United States Patent Application Publication US 2022/0167576 A1 - sequence listing, part 2

SEQ ID NO: 30 - DNA, 35937250 bp, Oryza sativa (residues 2,113,957-4,227,912 of 35,937,250)
  misc_feature (5969519)..(5970518): n is a, c, g, or t
  misc_feature (13681864)..(13682863): n is a, c, g, or t
  misc_feature (13684155)..(13684254): n is a, c, g, or t
  misc_feature (18795366)..(18796365): n is a, c, g, or t
  misc_feature (24815509)..(24816508): n is a, c, g, or t
  misc_feature (35936251)..(35937250): n is a, c, g, or t
tggtagccagtatagcttgaactgtgaaagctgtgtcccagagctggctgccattgtaaccctacagtaagccaaaccacaatttattgacattgacgctagtaagctgcatgcatgcacaaacacagtacaatattcatgcataatactccctccgtcccactaactaaggcgtgcacgtattttaagattaaactctttaaatatttgatcattaaatagtttattataaattaaattttatttgatgaaaacaatatcattggattatcatttaaatttaccttcatatgattatgattttgttgctacaaacattatagtatatgaaaaatttaaagtcaaagattaattttgaagaccgtgcaaagtttgatcgtgccttggtgagtgggacagaggtatagttgaccaaaacgcccgagacccgacaacctggcccatggcacagggttttggcctggtccaagcacgacacggcttgactggtgttgggctcgtgcctaggcctctgcctcagcacgataagccggcccagcacggcctggtccaacaatcaagaaggcaaaatagatgagggagccaaaatagccttattccaggcatataaggcacgtcccaaagagatgagggaggaaaaatagactttttccagggaggaaaatagactttttccaaggaggggcacaatgggctttcgtgccttcgggctggtccggcacggcccaagtcttattgggccatgcttggaccgttggtgcagcaagtgggcgtgctcagcctagcccaacatgtaggttgggccatgctggcctgactgatctcgggcccaggcccggtccgggcggcctatttggccatctatagtcgagggagtatcttccaatactagtaggcatccattgtgacaacttccacttaaacatcgagccatacaccacacagattttgtgcatagagtcagttaaaaagaatgatgcaaatacgtaagtatcaactgaaaatgctaaaataattttgcaatgtgattaagataagcaaatatgtggataagcttactgttgacacaaccacctcaactgaaagcaaataaaatggattcaaaagatagccattagtcccaaatatgaaataagcacttgcatcttcatgccatcttcagcgacccacaagtaatcatgaacccttggaatatgaaatctgaatgcctctgagttaggattttctatccagcaagaaagcatatttaatacctgcatttaaaaaaaatcacaacaatcagtaataaaggcatcaaagtaaacagaagaacaagaagagctcttttttttagagagttgtcattgtcttcaatttaccttctgtacagcaccgctgcaaatgtatcgagtattctcatcttcgtaatgaatatgctgcatggcattcttcagagctttctctctcaatttgctgccaggccaatgcgatagaactggttcaacaaatttgtaaagagtggcccataggatatcttgccctaatggatgacggtagtacagatcctcctgcaatacataattcttttttctttattaaataagaaacttatcctacacagacatgtctacctgaagtaacaagaactgagtagcaacagacactatggtattgcaagataaagttgttttttatgtccttgctgtttgacccgtgcacaatcagaaagacaaagaaagtataaagctcataaaccttagcgcattggttacgagccttgtcccaattaatatcatcatagggtatattgtagagctcctttcgtagggtcagtactattggtgtaattgggccgacaaacttctttccgtaaatataagacataggcaagtataccattcggcagtgggaccatatccgtcctggacataggcaaacaaaatatactgattgtaagataaaattttctacagattacagaacactaaaaagaatgttgtaaaggcaccctaagaacatggtcgctgatctatctcaaacaaattggctggaggagcaatgcatgaatctagtaatatagggattgatacacttaaaaaattattagagattaagcatgctgcatgcgtttggttcaagggatggaatgggtcggattggattgaactcacttttcaaggtatttggtttggagatagatgggatgggatgaacctgaaagggaatattcttctaagatccgggttggcatggtcccttgaaaattggcagaccaatccaacccacttctttgtctcgctgacatgtgagccatccccttaaaactgggaccatttcatccctcatgccaaacagatagatagggccatcccatccaaaaacacaaggatgagtccaacccatcccaactcattcctaaaccaaatatatgcttatgatgttcagaataggcacgtaccttgaagaatttaaccaatctatacatattcctgaaccttcttccttttgttttatgaaaattccatgtcagcatattcataaattttctatcatatcattagagtaaaaatattctgtatttatgtttctgcaattatataaatccattctttccaaatggggctaatttcccctgtttcttttataaagggagacatagcctattgtactaacactttatcaacccacaacatggattctagtgcaatatacgtacgtggcagcaacccggtacacacttattcaaagtaagctgccaaagaaccatgtttgtatatagtgaatacctgcactagcatgcactccagccagtacctacgataattttctctattattgtatgatgaacttacactctaccaaattaagattaaagagtaaaaagaaataaaacgtaaggagaaggcaaacctggatgaaatgggaggaaataaggtagcatccacaattctggaagcaatgggttgttaccagaccagtcaaagacaccaagtaccttaagaaagttaattaagacattagcaggacctctctaggattgtaaaacaaggtagaattgtatagggaccagagcaaaaacacaaaaggaaattaaaatgcgtaggttccctactgaaagccaaaattttccccatgatgttgtgaaagttgctcctccatgatctaaaatccaatttcgagctatcaccatggctccatctccaccatctgattcgtctccaagtaatctcaaggtaacataagtcaagacagtacagaacatggtgcttgtgccctcaatgtgcagcccccagcctccatcttcattctgcacttaaaaagtttttgttactttctttacacaacataatgagctatacaatatggagaaggacatgaaacacacgcactgtatgcccttttgaattcaaaggttgccctctctttccattcttttaaagatgttctacatggattttttttaagggccaaaaaggaatgaatttctcgttaggggcttgataacagaaactgagaacatgttctcacatctgaacctctccaaagtctgacagcaaagggaagtaaatgcacgagcaaattagttcagcagccgattatcagcttcagcaaatgcaaatctctcatgatttttgaaacagattttacgattttatcacgaccgaagcacacatgtgtattgaaatgacagatttatctaagtaagtttttcagagttatttgggcaagttttatgtccttgcctgatgattatagagataccggcgaatctccttttgatgttctgttgatagcacagtatttagtgcaccagtcacatgcagtactataacctgggtaaaactgagttaggaatggagaagtaaaatgtacagataatcttatatagacaaaaggaagacaaatgtatgtgatccatattttctttacaaaatgtacaaattacatgcaacgattgcatgctggcacttggcgataaaattgatgcttgtctgatgtgaactgcttttaaacagaaatgcaggttctcttctaagggaaaaacacaaacaaaaggccagccattgcaagtgaaacaaccaagggactacaaaattaaaaaatggttagccaagcatgaatctttgggcagtactctagcaagtaccaaccaacatcaaagcaaggatgctaacagcaacatactagctccgagcagtgctttggaatgttttacctcatgaaagaaattgtgaatttagctaataacgatgtggatgaatttcaacagatccattttcccacagcagtgaaaaggaagtaccaagcctggaagaaggaacatgggaccagcataatccccaggccagtgtccatcatgtgcctgaagagtagaataacgccgaatcgcccttttcaaagaggtcagcaccgcttcttctgtgacatcttcatcctcgcccagcttgataccaggaatctccagcttagagggattcgatctagtgaactgcaatttgcaaaatggtattaacaagttaccactatatatattgcatagtaacccagagaaattcttccacaaaatgacgaccacgattgtgacggcagttcaattccatgaataattgaaacaaagtactccaatagtttatctaagtagtagtagtaacttttgcgattttattgtactagtgacagagtgactgtcatcatcgatcaaaacctagatgattaacaagcccagatctcagtgccgtgcgtctccgcacagctaccgaatccccgtcaccccaatcccacagcccagacatgcgtggcgttcgtcgccacacctcagtggctcgatccacccgtcgatgcgtgaaaatttgaagtgcggagagagacgtactcagctacgcgtcggagctgggcgtcgatcccgtggaggaggccggcgctggcgagcgcgccaagcctccgtggcggcggtgcggccgccataccgccgccgccggtggtggcgcgacggcggcgaatgtatctgcgcctccgcggtgatgggaagggagatttccaagttttattttactctttttatttttctaatagagaattttctcacataattatattcggattagtttggttatgaattggatgtagagtaaattaaagttcaattttattactaaaatttcactttataccactatttaaataatacattttttactttggattaagtaaaattatatttgttgtaatttggattgcctccgtcttctcgagtagtatatccatggttttcattataccggcttttttacattaggaattcccctcctgaagctatatgtaggccatacctttaatataggattagttggtatgaagagataagtgagctgagatagtctaaaccagtacagaggtaacattaactagtctaaactaaaatgattagataaagagtggtccaacttaaaactttgataatgaaagatagtcaaagtgcaattcaatcttagatttatatacacgactctttacatctatttccacgtatataattatattttgtacataatgtatattagatatacaaaacgagtgttgatatataactcttatcttatgtttctatagatacaattgtacttatcaatctagattcatctcaatataatgatttgttttttcttcaattaatatggtaatatttagacatctagaacgagtatggtgactcattttcaaacaatattaatataatataattataaataaactttttttctaaccgtatttccaaaaaacctaattaaacataaaaaaatatatcgatgggactggaagttggatgtgtgtttttcttacccaatccaaaccaaagttgatttcttcggttttgctatacgtttatgaacaattttattcatttaaatcacacgaatgtaattataatataattatttacattataatgtaactagcatatataaaaagtgttctaagcatataacatataactagtgtaagtcccagatagtacattacaaaaaacttttttaaacatgtgtctttttatttgcaaaaaaaatttatatggtataatattctcatgcatatattatacttgcaatccattacatgtacactctttccgtatcaaaataactaaacttacgatgaaatatgacccatatctttagccaacgaatctggatatgtctacgtccagattctgtcacattctaaattgagttattttgaaatgcaaggtgtatatgtatacaacctgcaggagcaggagaaggtcggcgctgtgcttgatctggtgtcgccggcgggtgaactcgcggcgcgccgcctcgacctcctccgccgcggcggcggcgtcatcgtcatcagcagcggcggcgtcgaactcccagacctgccggccgacgtgcgcgttggtggagctcagccacccctcgccgccggcgccggcctcctccgcgactcttagccgccacattatgtatatatgacagtatctatatatgtacatacacactatatattcatccatatatatacactcaaccaaacgacggaaacgagcgatctagctgcaattaattaattagcaaagatgataataataaagtataggtagctcgcttgctcgctaactccggatgtgttgttctgagctgaataatggaataaaatggacttctaaatagatgaataattcgatattacaagcaaatgaattaattaactgttacgagattgaaaaatagatttaagataatattttaatagatttatgtgtataaagttttctaaaaattacaaggttagttaccagcttgagaaacatgcttactactctcatactggttagttaccagctggacaaagaacaggggtgtgatcttctcctgctgcaattacgtaggggagcttcttctttcctttttgtttttcggggagcttcttctttctgataagcttgagtaatactccgttctaaaatataaggcacaaccacccttaacctaaaaaaacaagaaataattattatcatctcctagtttggatcaccctaataaatataatgcatgcatccaatgaaattagagatcttaaggtggatgatttaaaaaagtaataatttaatggagaagatgtcctaattaattgtatgtatgccttatatcatgaaacataaaaaaaaagtagttgtgtcttatattatacaacagaggaaatactggacaaatgattttttagcaaactgggtcggccaaagtcccaaggaaaggccaaccgattttaattctagatcaaatttatatactaaaccccttatcaattcgaggcagatcgatggagatctgacgctccctcaacagttcaacacattattttttggtattctacattaaatattgcatgtatataaagacaattaacaaagtcatctctagacactattttatcttatcagtttaggtgttccttcctgtatagtgacaactgacaaactgacgagtatcgttcatgatactgtatcagagttaggtatttcccattaattattattatgtggggaagtgttgatgcagtaatagtaatagtatccacatgcccacaaagtcacaatttttttctaatcatgcatgcacgtactaacatcatgtagtagcattataatttcaattcaattctaccctcaaccattctcctatgtcctccttaggatatcagcaatattttcttactaattgatactccctcaattctaaaatataagatataaccacccctaatctaaagaccaagaaaataattataatcatcttgtagttttgtagtttagatcatcctaataaatataatgcatgcatccaatagaattagagaacatgagagtggaggatttaaaaaagtaataatttaatggagaagggattatagttaattgcctacatgcatgcatgccttatattatggaacatctagaaaaagtggttgtgccttatattatggaatggagggagtaataagtaaggtaaggcttaacaaaagtaggtctctttgttatcaaaattttcacaatgtgtatgaggcaataagatgggtctcatgaacataaaaaatctaatagtctaatgagaaagatagaaagaagagagttaacacatagatgagaaaataatgtttttttatttcttactaccaggttatagtgttattgcatggtagttgttggtactatttccacaattatttactacttactataacggttgcatttatgcttactacctggttttagaacacattgtggatgttcttagagtataaaagcaggtagtaagcaataaaataaccttacaaccacaccaacaaacattgttaaagctagcaatagcaactatgtctgctaccaacaataagcaacttaactatagtatttatacagtgagcaatgtgcgtgcagagtatgtgaggctagggattttggtctttttttcccctcttgtggactctatcttatgttcaccttttacattcacacattatgacatagagtatgtattatttccctaaaaattagagtatgtattagctactacccactgattcgtaaatccaccttattaccaattttgacaataaacattactattacccttatatctatatggagggaattgacttttgcattgaccttgcccatccttatctaaaaaaaaattaaccttgcccatacgtactgtaattactcctcactcttttagactgatgtgattgtgacgtttataagctagttaagggtatggttcactacaatatgtcttggacgcaacttccctaacgtaaagtcagagtaacatgggtccttgacaggtggagctgacatacacagaggagcctcacctgtatgtcccccatacataaaagctttgaattctgtctcctcacccatcttccacaaaaattttcacccaactcggcttgtcagcttgttaacaaaaatagtccccaatgtaaaaatatatatacgccctccgtttcatactataaatcattttaactttttacatagtcaaacctttataagtttaaccaaatttatagaaaaatataataatattttaacacaaaacatacatattatcaaaatatatctaatgttacatctaataaaactaatttactactgtatatttactaagtttttctagacctaaaacgagttatataatatgaaatgtagatttactaagtttttctagacctaaaacgagttatataatatgaaatggatgtagttgttgacagaaaacacgaggcatgggagatctgcttaactccagtacaggtcaaaaactcgccttcaaatgtataagcgtgccagttgatttgatcatgtaatcaacaagaaatagagacaaagaattcgtggttaaatctataaatgatagccaatcggctaggtgccgatgacatatcatttatctttgagccaatgtcatatatgaatcaatcggcggttataaatagatagtaaggaactaaatctatttgatcggctgtagatattaacgatatatagttcttatattaatatatacttaaatcaagtgattgggatagatcggtcaccatgctgagacagtataaatcacttagatcgaaatatatattaataacaggattatatatgtttatagtatagccgatcagatagatctagcatgtatcggctaatactcagatactactttatataaagatatcaaaacaaatataatataccaaacaaaagcttaatatacttaaatgcaataagatcctgatataaagggcggatttaacatgtcattgaagcatatagatcgaatatggttaaatcagataagatcggctgaaactccgatactaccctaatcgacaaccagaggacaggctagagattgatattctaagcacgacttaatagatcaaactcaactgatgcagcattaagtatgaaaagaagaacaatatctagacaatcaagccgctgggtgtttcataaagtggtagatatcttatatgatctaggacaacgtcgctatttaacctaatcggctgccttctattaacagatgttagccgattgtaagttagatgacgatattgccaaggattatgtaagatatatgataacttgatgaattatatagacaagattagagtgtcataaagatggaagcactaatctcgagaacacaagtcgtcataacaagttttacctcttgttgaagatcgaaaccgatgcagctcaacccgaaagcaagaactcgtcgaaacaaaactaaagtaaaaaggtggcgatgcgccgaaattgtattgaacgtgtgtgttaaaaattacatagggctcggggtctatttatacccgagaattacaagatatgtccataccggacacgaccactatctctaacaaactctaagataccataagtctttgcggcagatttttggccaaacatatctctaaggaagttacataaaacatcctaattaataaatacaattgccttctcaggactctatccatgtgcggcaatcatcttgaagcacctcaattcaacccaatgtcatacaccaaattatactgtcagaatcggctgcatcggctcacctagtccgactcagacccagccgaccctaatcgtagccgatctggacttcagtcgattcttactctgttctcggatcaatctccgccttcgactctaccttgatctaatctccttttccgatgcggatattaccaaatttggtcgttaacagtagtatacgacaaattatatactacatttttttcaaagaaatgtcgatagaaattggagtaggtggcggtggcggcagttttgcatatggaacccttgggcctggaacccatctcaacaccctctttccccaccggttgccggcgacgtcgccgagggtttctctaccaacaggaacacgtgtacgcgccacagtggcccgcgtccagcgccgctctcctcggccaccaactccccagtcgcctcccgccccaacgaccgagagctgcctctacggcggcagcggcggcgccggcgacgatcagctcagctcaccaaccccgaagcttcctccgcttcttccggtgtctacaaccatgtggatgacgtatgcaaacgcacaaacattttgcattagcagccggaattttttactgttcatcgccgcatcatcggaattttttattgcgacttttcatggacaaagcgggattagttgggagcatttcaatcaatcaatcaatccaaccaagtcctagttaattcgcctcgggatccgccatgtccaccggcgacgacgacaaccacggcgatccgctgcagcagcagccggaggaggaggacggcggcggctatggcgatgtcgccgtcggcggggggttgtttagtgtccccggttacgagtgggcggacgtggcggcgctggggccggacgtggccggccgcgccgtgcgcgtgcggggcgcggcccacgcggtgcgcgccgtggggcggcgcgtcgcgttcctcgtgctgcggcaggggtcgtccaccgtgcagtgcgtcgtgggtggcggcggcggcggcggcggaggaggagacgccggggtggcgcggttcgccgccgggctgagccgggagtcggtggtggacgtcgccggcgtcgtctcgttgccgcgggagcccgtccgcggcaccacgcagcaggtgttcgacgttttgccgctcccacccatcaccaccatcccgatcacctctgcagtctgctcatggctactcttctgcaggaagtggagatccaggtgaagaagctgtactgcatcagcaaagcgactccgaatctccccatcagcgtcgacgacgcggcgcgaagcgaggaagacgtcgtgaaggccaaggctgtaagcttttttttgtcaatccatacactgccattgatcacagcaaacaatcatgtttcgttggagctatcattgtgaacttaattgtttcgttgcatgcacaggccggcgagcagctcgttcatgtcgggcaggacaagcgcttggacttcagagtgatcgacctgcgcacacctgcaaaccaggcgatttttcgtgtccaatgcgaaatcgaaaacgtaagatttgcacattgaacacgggatgatctcacggaattacccagaaacaaatttggcaaaagaattattcaggaaccgaatttgcgaaagaaaaatcttcagaaaccgttggtgtcacaagaatttgtgatctgatgagcgttgttgtcacactcttggacggtgcagatcttcagacaagtgctgctgtcagaaggtttcgttggcatccacacgccgaagctgatcggcgggtccagtgaaggcggcgcggcggtgttcaagctggactacaacggccagccggcctgcctggcgcagtcgcctcagctccacaagcaaatggcaatttgtggtggattcgagcgtgtgttcgaggttggccccgtgttcagggcagaagactccaacacgcaccggcatttgtgtgagttcgttggacttgacatggaaatggcaatcaaaggccactactctgaggtaatttagctccgttgtttgtgaattcagctgtgtaagtgatgtagctgcatgaacagtgacacaattttcttttgcttctcttgtgagaaacaggtttgtgatgttgtggataggctgtttgttgctatgtttgatcatctgaacaagaactgcgccaaggaacttgaggccattaacaggcagtatccgttcaaacctttgaaggtaagcaagtttatggattcagatgaaagattgttggagctttttgttgtattttgtactccctccgtccgtttcaagttataaagatgttttggtcaaagtaaaactgctttaagtttacaaagtttatagaaaaaagtagtaacatttttaacccaaaacaaatttactatgaaaatatattcaactattgatttgataaaactaatttagtattataaatattattatatttatctataaatttagtcaaattcaaaaacagtttgactttgaccaaagtcaaaatattttataacctgaaacaagggagagtaatatttacttgatgtaatcgtctgatatcaataaaaacttcctttatctaaaaaaggaaaccgatcgatctaccacaagttaatcactggcggatggtttcagcgtcaaagttgctcagaccgggggcttattcatttgtgcataattatgaatcatcatagatgtgatagcactttgcaagagcttattatacagaagaattaaccacaaatggggattaattattgcagtacttacccaagacactgcgcattgagtatgacgaaggcatccggatgctcaaggtttgtgttctgtcatctcaactgcacataaaccaattcttcttgcaaactgagattcttttcttctttctatcctctccttgccgtcaacaaggaactgaaactgattcaactaatgcttgtgaattatgatgtcatattgataagaaatgtcagtaacaaatccaattgacctctctgacaggaagctggggtccacgtggaggccatgggagacctcaacacagagtctgagaagaagctgggcgagctggttcataccaagtaacctttccatcatctcatctcactcccacatgatggagaactactagcttgctgttgagtgttgaccactggaattgttatattagaaaatcttacttagacctggtttggttcccaacttttttttcaaacttccaacttttttatcacatcaaaacttttctacacacaaacttccaacttttccatcacatcattctaatttcgatcaaattttcaattttggcgtgaactaaacgcacccttactagtacttggtattcttcaactgcaggtatgacactgatttctacatgctctgccggtacccgtcggcggtgaggccattctacaccatgccctgctccgacgacccacgctacagcaactccttcgacgtgttcgtccgaggtaattgacaaaactcatctcaagataccaccgatcttctcctgagactagatcattctctcgcaatttggagggaaaaaaatgaaataagattttctggccatggaatacaggggaggagatcatctcgggagcgcagagggtgcacgtcccggaggtcctggcacgacaggcggaggagcgggggatcgacgtcggcagcatcgccgcctacgtcgacgcgttcaggtacggcgcgccgccgcacggcgggttcggcgtcgggctggagagggtggtgatgctcttctgcggcctcggcaacatcaggaaggcttctctcttcccacgcgaccccaggaggctgaacccctgaaaacaaaaaaacacaaccaactatccaccccaaaaccaactggtttctttcatgtttgtattttgcgtggcaagaattctatctgaacacaaacattcgattcaggaatccattcatctcgaacttgtgtcaaaatgcgtttctatttgactacgctcgcgtggcatcactaacgggagaatacatatagccacattattacaactgaaacatagctacattatttcacgtataaatacatgcacattgttggtgctgctgctctgctcgtgctgaactacttgtctgcggccaagacgcggcgacggtactccccaagggcccaaatagggaagatgtttctatactcggagtagctgatcatgcagtttttgttgaagactccaatgatctcctgttatatggttggggggggggggggtaaaaaatgttatttagcatctcggatgatggtaaataatacatagtgaaaggaaaaggataactcatgtcagcaatttagttttcctcgttcaatatcgagtgaagcaatgcgtgttcccctagcatcaaagatcttttaacaacattgcgcaatgatacttcaggataatttccaagcaactttggatctatggtcgaccggttagataacatgcctagaatagtctaatgattagaaacacgcaactaagggacaaccctcagtcaattagtttagattatattgcttgtcaatacctaaaccctatatttctgtgcttctacttatgcccattggaacttctatgaaatgctctatttttaaaaacagaagtttgaatcaccacaagattattacaggctgaagtaaatgcatcactttcttttctagagcaacgtttcatgtcatgaacccatgggatggattagaacttacttgctggggaaattcaccatcttccgattgtaagttgatcaaaaccttcgctgctcgatgcaaaggaattggatctctctcagcctgcaagaggaaagtactatcacgaataagcatatgtatcattttacgataactgaaaagtcaaccatacacaaaaatatatttaacaaaagacaaacctgccctgcatcgattagggctagcatggcccaaccagtgttcaccgcatgaggtcgcttcccttcgagattggtataaacctatttgaaaacaagccacgagatggttaaagcaaagatgaaacctgtgtaaattaagaatcaatacaatacctgatcaatacagtatttcaagtgctgtctatgtgcaagacaatgtccaacatattatttgtaaaggtaatgttctaatatgtataaaaattcttacatgccacatggattacaaagaaaagaaatacaccttaatagttgattcccaaaaatatatcatttgttgttacatatgaaagcatgttggtagtagtcactactaatttaatcttttaagactggaagaaattcaagtgactaagcaggtggcacaaaaaaacagcaaagaaccctgcaacacattataacctacctgtgcgccatgcagaaaagagcaatggcatgaaatttagcatcctactctatccagtacaacaaaatgtagcaccacaaggttctagttgtatcccgattgtagggaagttctctcatgagttcatgtccacttgttaaaactttacatgttttgaagcatttatcccaaacaacaggtgatattgatcagagcacctggttatcaacattataatagatggatgcgatccagtaaacaagattgaaagcatatccatgatacagaaaaaaaaaaagtaaagaatagtaacattgtgcaaatttcatagaaatgaatttacctgatcttgggatgacaaatagctttctccccagcctccagaaggaagctcttttgacaacaaaaagtcacatgcctttctgattgcaggactgtttttgaatgtcctaccagcagcaactaatccctttacaccaaaccatgtgccataggtaaaacaaacagcccaagaaccatacctgttggaaaatacagagtgaacaatgtagacaattttttttttgaccaagggcagtagacaatgtagacaattatatgcacgcaatgttcttattgtttcatgtgaagtccttgtactaaccatgaaccatcgcttttttgaataccctcaataaagctagcagctttgcttatacagttgtctatttcactcttgcggtgtccagggtagagctttttaaatgctgtcagggcctgaattgctgctgaagtgcattccacataactataaattttatacacatacaaaggagagaaggaaagaaagatcagttcaccttctacatggcaaagcaagaaaagaggacaatggatgggttgtaatgtcttacggataatcaatcacaatgtccccaaaggtctcagcaggattgataagctggaaaagttcaataacgcgtgtcaatattcatgaaacatagtcaacagtcgcatggaaggatgttccatagtcaatataaaaatattacagccaatggttaattgtccttttcaaacaaagaaagcatctaatcaaagagctcaacaaatctttattatattgaacaagattacaagaacaattaacaaatttttaggtgccatcttttgagtcagcaacttcccagttttgatgtcagcgcagaaattgacttgcagcactgcttgcctagacaacaaataagagaaggatagtcctcaaataagataattatactcacctccagccaggcataagaccttgtgagttcatatgttgcaaatccaccattatcattctgtcaagagtacaaggatctgtaaggtaaggttcctcccaaaggaacatgcatgtgatatatttaaaacaccaattaaaatacacaagagaatgggggagctattggcaacaaaactttgtggagcactggaacttcaaaacattttttttttgaagaaatgattatatgtcgtacttcaacaaatctagtttgccatagttctatgtatctttagagaatagttgagtggagaacccatcaaacctgaatgcccggtacaacaaagtaaggctgcatgcattagtaactcttccttcagccattaaactgctatattagagacactttatagccatgacaaattagacgtcttatgataattgataagcacaaaattataatgtgacggatgccttttcatacataagggtacttgcagattcaattgttaaacaggagtccatttaccacatcccaaattttaattatcaactgaaaagcagatctccaatattctaagtttctaatgcatattaatcagggttgagaagcaaaaaaaatcgtttcggtatcctacagaaatacgaggtgcttaaaaaagggacaagacaaacatcttctctgtccttgttctgaatgcaaaaggagcacttgaatataggcatacactatatgatgcttactgaactgctgctccaaagcttcattttttttatatattattcatgttacatatgaaatgttaaaatgacatgagaggtttacaatcacccttaaatatgaagactgattaaaacttaccatgtatgacatcaaacaattgacagaatcatacagtctattaacttccactgcttcgccaacaatatctggagaaatcttcgatagcaataatgccgcctaataataaaacaaaacgagaacagttcaaactattacaatgtcaagaataccagcagacaattgctatggaacagactaaactttacagataagatcataagagaatctacaatggttcttaataactatttctcatgcataccagagagtttatatatgctagaagagtagaagaacaatattttctcaagcttgaaagataaaatttaccttaagtccttctgcagtgcaatctgatataggccaaccatgatcagcagtagaaaagggccatgcacctttagatatgtggcggtaccactgactaagatctccagggcagtcatcgataacctttcaggataaaagccacaggtaagtaatgagatggcttgaaatgttgattagtataatcgtataagggaacatgcatgaggcatgcacctgcgttttctttatgtagccatgtgctagtttaagagtaggaccaaattcttcaatgaggccagtagccactatagcttgaactgtgaaagctgtgtcccacagctggcttccattataaccctacagcggtcacaaaaagaatctatagttaaagtaaacagaacacacttgatgcaatgcttctctaaaattatgctatgttaaaaacttcattggcagaaattatgccaaaacaattttccaatggcatcaatagacagtaaatcacacttgttcaataggtgtcttgtgccaaagttaccaactttcttgttggaagttagagtaaagaaaaaaggtgacctgcattttcatgccatcttctgcaatccataggtaatcgtggactcttggaatgtggagtttgaatgcctctgagtttggatcttcaatccagcaagcaagcatatttaatacctgaatagagagaatagatttgaatgacaagaacacaatgtattgcctgacatgactgagcagtttaattcatcaggtattaaagcatcaagagtagttacatcttatagctacgggaggaagaaacaaaaagaaactccataatctgaagtttaatgaaccattcaaaaataaattgcttctttgctacctatatatgtcttcacaggactataataggcttattttggcagaaatgttcatgttttaaaacaaaagaaacatagaaggggaagaagaatgacagtgaacttgccgcttgagagaaggtagtgcaactaaaacatttttaatctatataggccgcttggtggccacccaaaaaaagggtggtgcgaggagccatcgtcgctacaataaaatagtaaaccaagataaaaaaaaaatgggtgaaaatttaaaggggaatactgtaaaacacagtaattatgacagtttccctctaattgcagctgcacatgtattccattcaaagttgaaaattgtaagtgtgtacccatataatggaatggtttcccttttatgcctgcagcaagaaaagaaagaacgacccactttcttttgtaatgaaccaataagcaatcatagtcttcaaattaccttgtttactggaccaatgcaaatatatcgggtgttctcatcttcataatgaatatgctgcatgacagtgtccaaagctttctccctcaatttgttcccaggccaacgcaacatagctggttcaacaaatttgtggagagtggcccataatacatcctgcacgaatggatgtggatagtacagatcttcctgcaatacaatacccaaaaaaaaaaactttcagaaagaaaaatccagatcttattaaacacaaagtgataaaagcaagatacataggataaattatgtaaaattttgggcttactacaataacttttcaagccatgcacgataacaactaagcataacaaagtccttcagcttgtaaggagcttaaatcatcagattacgagtcaaagtcatgatttcaactattggcttgtaatcgaccagggaacaagaagaaaatttaaactttggctacttctaaattttaaattgtacagtcatggtaattgaaagttctaaggttatatttatcacttcaataatataatatacttttaagtatttaaaaatgataaataatatggtggtcaaaatttgtgctctgaagtcaacaatgccaattatttagaaacatatggaatacattattcaaaaaaggcacagtttttgcgtccaaaatgtgttcaaagtaagatgacaatatattactgatgattttttaactcacctcataagataatattttaccatactgttgtcaaattatcttatgcacgagaatacaacaaacattaagtaattaacaaaccttagcacatagattgcgagccttgtcccaatcaacttcattgtagggtacttcgtagagttcctttcttaattccaatataattggtgtaactgggcccacaaacctctttccataaatgtaacacataggcaaataaaccatccggcaatgacaccacattcgcccttcacataattataaagtttatcagtaagaaattactagcactaatgtaatctacagcaagcaaagtaatgaatatattatcatatacattcaataggagaagatataaatgcctacagggggagcacaacctggatgaatcggcaggaaatatggcaacaaccatatttctggtggcactgggttgttgccagaccagtcaaatacaccaagcacctgacatgattagggaatataaagagttgttacatttaaaaaccaggttagattattacagcggtcaagatacagagagaggaagtgttaactccctaccgaaagccaaaacttgccccatgatgtaatataagttgctcccccatggtctaaaatccattttcgtcctttctccatagctccatcgccgctatctggcccctccccaagcaatctcaaagaaacatatgtcaacgctgagccaaacatggtgctgtggccctcaatgtgcaaaccccatcctccatcttcattctacacttacacacagaaaaggaaaacattgcctttacttatttcaagattgtagaagtgtaattagatttcttacctgatgattgtagagataccgccgtatctccttctgatgttcagatgacaaagcagtgttcagcgctccgctcacatataatgttataatctgagtaaaatagaaaatataatgagtaactttcacatataacaggcagtatggaacatttcttttcatacaggtcaagattatgagtaattaaaaagaaattccatagttcaaattttagtgagtaaccaaattggaaacgacttgtggtgagttagaagagtaccaagcctggcataaggaacatgggaccaccataatccccaggccagtgtccatcatgtgcttgaaaagtagaataacgagcaattgccctttttagagaggataatacagcttcgcctgtaacagcttcatgctcctctagcttgatagctggaatgtccagcttaagaggatttgctttagcaaactgcagaatatacaaaataaatgcttaaatatcagggatgacatgtgcattgactagtgaaaaagacactaatttcatggctaatacatagaattcagggcaagccaaacagaagtaaataaatgaaaaatattcagcacaaaattgcacgtttaagatattaccggacagtctataaaatcgtgacgtcagaaagttacctccaagtataatcacatttgtctcacttttttactgtttgcacatgtaattggtattagacattttgaagtaaaaagtacctgagttctctgcatcctacagtcctcataagaggctaaaaacatgctaacccagtttgatttgcccaccggccactgcacattaaaagctactttgagttaaggcatatccctatccagccagctcttcccattgccgtccccacaagaacccaaatttttaggtaatgaactggatggaggccccccacatggtacttcaccagatccccaaatttaattccaagctactcggtgcacaagcaacccggaatcaccaaacaatttggatgcagagctctcagggaacactgaaacacagacaagacaatgataataaaaaaacaagaattcactagtgcagggcatcctactactgctaattaacatggatagcgaaacatctctatattgtcaatgggcaactctgcgccgcaacctcgaatcgtatggggcgtatggctggaattgaatgcagcatccacatcaaaatccaccactggaacatgcaaacggatgaggcatagcgaaaagggaagagatcgatcgccggcttgcatcgcatccaccacgaattctagcacgaataaggaaaaaagaaggcgcgtgcaagttgcgagagcccatctccgctcacccacccatccacccgatgcgcattaaaccgaaatacactgtatctgaaacagcaatcacatcatcaccgcattgaacgcttccagcgacagcgtcgcgctcgatcggtgacgccgcctcccgcgagagaacaccgcgcgcagatgtgcgcctcgccgcctccggccacgagcaattcagacgagctaagcaaagggggtagtatatagtacagtagtaggagcgagagggtggcggcgcggggagaggcattttacctgcatgcgcatgaggaggtcggagctgtgcttgagctcgtggcggcgggcggcgaaaccgcggcgggcggcctcgacggcggcgagctcgtcggggtcgcccgcggcggggtcgaactcccagacctggcgccccacgtggccgttcttcgtgcgcagccacgggtcccccccgccctccgccaccctcagccgccacatcctccccccccccctccccctcctcgccgccgatcaaccaaccaaccaaatcgacggcgtcagctgcggcggcggcggcgagagagcgaatcgatcgggagcgcggggcggcgcacgagcacgagataccgccgcgttataatacggaggagcggcacaggctggaactagtggtgatctggattctggcctgctgggttttttttttggctcggcttgggccttggggcccactctttctttgcggttgtgtggtggtgatgtggcactgacagattgggcccacaaatgccacgccggctgtatgaaaaggaggtctcgtgggctgtgtccggatccggaatgtctgtttttcttttcaaaaaataatactattacttccatcccatattacttatttatcgctttgattttttatttataatatctgatcattcgtcttattaaaaaatttagaattattatttattttgtttgtgacttgtttggttatcaaatgtacttcaagtataacttatcttttttatatttacactaatttttcaaataaaacgaatggtcaaacattttaagcaaaaagtcaaagcgacaagtaatatgggacgtgaatagtactatatatagtctcttcgtttttaaatatacgacaatgttaattttactcaaaaattttaagcaagatcaaatataagttcatgcttaaaacctttaataaatcaagtcgcataatacgtaatttttttaataaatattaatggttaaacgtatccaaaaagttaatagcgtcgtatattaaaaatagaggttgtattatctcaagtggttggtgcgtactatctctattctaaatatagtaacctatattagacacatcataatacaacgaatttatagtatcttaaaccctgggtttgaaaagctcaaatgtttttcacatatttcaaatgaaatttgtatgaacagggaaagatatttcatgctcgatagatttcattatacaccactcaatttgcaaaccttttcaaatttgaaattcaatgtgcacgcctttttaaattttgccattgaggatgtgaattctttcattccgtgccgctttatccatttgacgtctgtccactaccactgcatgataccatgacgctaggcaccctccgcgaaggcctagcccaatgatagcataggtggtgcccaaactcaagcccgaggacgacgtaggcagagttcaaggtcgagccgagttcaaggtcgagccgactggtgacatcaatattggaggttgatgtcgagcttgggacggtgtggccagaggtcaagtgtggggatggtgccaagtgccaatggggatcgaggtcaaacctaggattacgcaagcaaaagactgaactcaacgatgaaggttgaggttgagctagctgcccgaggacagtggcaacggggcaccgatggaggttgagcgagctagtgaccagggcacattgcgatgcgctaatcaacaatggttgtggtgcgcgacgacagtaggccaatgaacgaagtggcacaaaatgaccgaattcgcgttctcggtggtaaattctaaaagccacacaaattaggtggcaaatttcaaaatgtttacaaattaaagtggcgtataacaaaatttgtcggtaccctcctattatctcgaaatgttgtcacctttaaactttttaaaaatgtttctgattggttgaaatgaaaaggcaagtggatagatatctataatttagaaaaggagatttaaatgttaaagagtagctatatgttttaggacaatagattaataaaaatatgagaccgatattttctcgagatataatgggaggtttcgtaagtctatattgatgtggcacaggtcgtagttgtgtggtgttcaaaatttcgggaaggcacgggtcgtgaaagtataaccgaaaatgtgtcgatcacaagttcacaactacccctaaggctgcgttcgggaaaacggagcagcgattagcgggtgattaattaagtatttgttaattttttttcaaaaatagattattatgattttttaagtaacttttgtatagaaatctttttttaaaaaaacgcactatttaatagtttgaaaaacgtccgcgcggaaaacgaggagaaatgttgggaaatggagggaaatggaggaaacgagaagcagtttccctgcacgcaaacatattttttgcgaattgcggagcatccagaattgaatacgtagcttgtttgatctttcttttttctttgagttgcttgtttgatctgtctagatgctgactacatcgagaaaatggacatttggccatcttcaaaagtaggtttcgctattatgccatcttcaaaacgtgattcaataaaatgccaatctcaagcctgcactgctatgagaaaatgagaaaatggcaatccaacgagtaggggcttgagattggcattttatcgaatcatgttttgaaaatggcataatagcgaaacacagttttgaagatggccaaatgtccgttttcttgacatgtccattttcactgggcactgccatgagctgtgcaactgtaaatctgtaattcttgcatttttctcatcttttgttgattgtaacatctgtgacttgtttgccatcaaagaatggttgctgcttttcattttttatgtacaatttatactggtttacttgtacatggagtagatggatataagaaagcacagggattaggttatgccatggggatggcatttgaaaaaaaaaattactcgcatataaaatgcgcatatagaagtagtatgtgtacatgaagtttgaaacaatacttactgaatcttttatcatgtaattttgttattgatcagtccggtaatgtgcaagttaccatgagtaatttcttacatgaagcttgttaatttgaagtttggcgtcactcgaattacaaaacaaaacttccagattggtatttactgatatttttgcttaaacacaatttgcgtgcacagctgcagagaacaaaaatgctgctgaagcatcaaatcaatgatctttacatgacctttgataataatctttacatgacctttgattcaggaagggaagacaaattgagagcaagaggtatggtaggactggagaggagagagccaattgtttgtcatgtacatatgattcttttctcggtaattaactccgaaagaaattatcaattaataaaagccctaaagctaccgattctctcttttttttgaaatattatttttttttgctcctcgttaggagctcctcgattgggtgagctgtggagcctttccttttctctctcttcgggttccccatcggttctgccggtcacgcgctgcatgtgcgtcacgttttgcctccttggagcaaatgacgcgtgctgatatttatgcaaaaaaatcctcgtgtttgaacggaatagcgtgcactgcctcccaccgactaacatcacgttccattttatacgaaacaaccctcgtattttatagaaatacaacacgaagaagatagagttctactcttagggggtagcgatgtaaacataaaaaacaagaggttttttccaaaaaaaaacatatcatacctatcccctcccctcccagctcccacccccaaactctatcctcacatcccctccccacgacgcttcgccgccgcccctcccccttgctctctcccctatcccgccgccggccggcaatggggcatgcggcggcggctgacccagccgcgagcgccagccgtccccatcaggaagccgcggcgggcgaacagggcaagcagggagccggggagcaagaaatcgtcagcgtggaggagcttgcggaactcgacagcggcgaccacaacaggagcttggcggcgatgccggtttcgaccgcgagttcgccacccctccccacctcacgcagatcgaaagacgtggagctccaccacccctcctcgcgcatcgccgcccggccgcctcccaactcctcccgtgctgcgccgcggccctctccccgcgcgccgccgcccggccgcctcccacctcctccccgctgtgctacgccgctaccccctccctcgcgtgttgtcgccgtccttccgcgcgccgcctcccacctcctctccattgtgctgcgccgccgcccccttcctgtgcgccgtcaccactgcaggttcgtatgaaggccgagaaggagaaagagaaggaggattttccggtgatggcgatggtggcagggctgccgatgaggatggggccgaggggtagtacgaggcgtgggacctctccgacaatgaggcggtgctgggcagatcttgggggtggaactccgcggggaggcattaagtaggtcagcggcgcggaggagctctctgccctcgagtcggcgcggggacggtacagactttgttggcggcggcgaggaggagcaaggcggagctgccgccgtgcgggcggcattcggtggcccgtgcgacccccccccttccccaagtgacggcaacgggggtcctccggcggatccgtcgccacacgaccggccttcggcagcggcggatccggacgtgcgcgccctatgcatatgttagcgtgcgcggcgtggcgccgcgcttatacttctagtggatttgatttgcataacaatacaagtcctcggactgtccagctgaaattagccatgaagatataaacatgcactttaagtttagttcacaacccaacagcaaaaatgaaataataataataaagctgaaactacgacttacatgcaaaaaccactacatagaacggaatcatatgcaaaacctgctttcttgtatagagcttgcaatcgtaatcaataaacaaatatggttaaattcaatcaagtggtcttcttctttttctttgacttgagcataacaagacccatgaacacgcttaagaaagataggagaatcacgccagcaagcactgggatcaaaatagcatactcttgaggcagaaagtacttgtggacgaagtgatcactgtcaacaaatggctatattgaaaaaaagaggaacagcttatcatccagaaataaaatcatagatgttatatttgaaatgaaaaacgcctagatgttactaaccaggatgatgacccagaaagtatagtatgtaaagatggatagacttgtcaaggttaaaataaagcctactgccttgtcccccaattccatttgtgcagatattgtacaaatctaaacttgattcagatgataaaatctacttcctacatgcacacaaaaacagtctgcattagaaagcacaccaaatatcgaattgcatagaagtaaaatctcatgaaagttagtcctatttggggaaataaaacaagatataataaacccaaagtatttatacagcacaaaggtggcagaggtggcaacgagatggagacggagagacagtgacaggacctcagcagctgcagcgtcgtccctcacacagtggccttaataggaatacaacagtttgcatgttagttttaaccattcctcataaaataaattatctgaggaagataataagataaaattcagaaacaatattcaggtaagtaagtcagtgtgttatcataaaccctataaatcagagtgttcagagccacatggtattctgaccagttcccaggcattttcctagacaagtttatactcccaaaactttgctagtgaattaccacatttatagagtgcaatgaacttacccatgtgcatatctcaaaaatcgaatgcagtaagcacaataaagaatgtaattaaatatgataaaataaaatccatttctattagggtaatgttataaaattcatgacccacataattttagtagccgttccatggtaaaataaataagagcattaggattccagtggcagttgtaaataaaatccatttctattagggtactgttataaaattcatgacccacataattttagtggcagttccatggtaaaataaataagagcattaggattccagtggcagttgtagaagccccatcactgcttgtactcataattcttctgaagcctagcttcctattgctttgcactaaggtaagaatactctccttatcacgctttctccagaccttgactatagtaatgtgcagcacagcagtgcagataattttagaaaaagattatcctggaagcaataaacacaactattccccaagaaaacctgctgtacatgctacataatttcttgcctcaatcaccgtgtatgtgagttgttagattcaagaattttgggtcattggatttgatgaatgaggtatgtaggagtgaagttggtgaattatagggtagataatcaaggttagcagtgacctgatagagaaataaattaaaatgataaaatttgtcaatagcaatgctatgtcattgttacattttaaaaaaccctcagtgaaattagagccatttcttttcccattttagacggcacaagagaatgcattctgcaggtagtagctgaatatatatcatgttataaaatcccactcaatatctctagcatcatctcacaattaaaggaaaggagtaatgtaagatactaagattgcttaacaatttactcagatttattatgtattgtcaattctgaatcgaaccaaataaaagaagggataatttgcttgctttcgttcaaagtgcagaaaacaaccaaataaaagaaagccaatccaatcacctacttgtttaccgctgatccagatggggatcctgctcccgtcgccgatggcgatgctgctgttccggttggaggggagcggtccgcagtggccgtgaatagaggcgcgaccagtgagatcgcaagcgaagatggtgaggggaccgcgggatccggtgctagatgctccgagacgaccagggttggggttagggttagggtttggagagcgagagcgaggaagggggcggggggcgatgcgggactgtggagcggggcgcggggggattggggaggcggatttctctatcaggtcaggaggggcggacagggggtcgacggcgcgcgacggcgatgatgcggcatgcgacggcggatcggttgagggcgacggatgcgacgacggcgatggggatcggttgagggcgagccggcggcggggataggtggcggcgagacgacggttgcgacgacggcggagcggcggcagtcgagggcggcgtcgacggcggtggcgcagcgtgagagggagagattaaggtagacgggggtttgggcgtaggtcggggttggggaggggcggcggcgcgtgagagcgagagagagggggcggagaagagggcgcggtggagacgatcctcagcgttggattttaagcagagatgatcctgaccgttctacgaggaataaaagaatgagtgatgagtaaaatcatttgttgaattataaggtatatagatagaagaagaagaggatgtggatgctcaccaggatcccctcctgtgctcgccagatggagaccggcgcccctctcctgttcagccacgagatggcgcaaccgtgcaaggagcggaggagacgagtcaggggatttttcttttacgcaaagggaagagggaagatacttgagtgcctcacctttatctcaaatttagtgatgttatccattttatttatcatgactgatggtggttcacagagaaaaaacgcaacaaatttggttgaggatttatatcagtgccgctccatctaccaccaccgctctttctccatgaggcaccatcgttcctcctgctccatctaccaccactgctctttcttcatgaggcaccatcgttcctcctcttcactttcacatgtgcaattgcactctctagtcactgatttgtctttccgcctcccgtattttcatgcacgctattgtcatggtcgtcgttgaggccagggtatcggccttgcaaggactcaggacgataggagctgacctgaccgagagcgaatacgctagatctaggctcctccttgttggatctggcggttcctagctattagagggaaaaagaaaaaggagagagagtgtgtgtatggagtggttgtagagtcactggatttggaggtgaagcaacggtgattccaccggacttgaagatggatagaatggggttgtctaaattgaaacaaaaatataaagttagctattttataaatgaaaataatgattaaagaatgatataatatgaaaatttttaaaaatacgttgtacaaaatgaatttactatttttgtccattagccgtagtctcatgctatcctaagtcactacagatttatcgttactatatggtatggttgggcggtctacttaactattactaataatctcatgatatgttaaaacataacaatacagagttctacttaaaaaaagataaaaaaaataataccctcgattttgctcaataataaagtattcgattgtggtcccttttctcactgcacgatatatcatgactatctcttatatgtattattttccctcattctttcatattaatttttaaattttaggtatatgttaattttgactaatatttttctcataaataaatagacaataaatcattattttatatttctcctataaaatgtgaatagtgaattatataatttgaaaattatattataagtgtatataatttaatgtttgacttatctctactattataaaaattgaagatgtttttgccggtattttggtacatcatctgtgtatgagtcagtttttaagtttgtttgcttttggaaatacatattcgtatttaagtcggttttcaagatcgttcacttttggtaatccataaggaattatgtaagaaatttgtttaaaaaactcgcatgctaacttgagatgatctactcctaactgcatcatgattttctaaaaaaatatatatccaagcgaaatcccacagtgaattttatcttaactaaaccatataacaataatgagattaaaatatacttcacccgttacaacgcacgggcattttttttctagtagataatcatgcaactgtaaaacgaaactctctcatgccagcaatgaccacgcgttccttctcccttgaaagccgtggaataccaagcgatagttcgaactgaaacattcattcgctatttgctgaaacattgtttttatataaggtgaaacaacacccgatttaaacgagtgaaacattttcgatctacttagtgaaacaattccgatatatctggtggaacatcgtgcaatatttaaaaataattcaataataagctaaaattttttttcgtcggaatatatccatgtgtggtcttgttttgaagatttaattgcaacgaatttaatggtgtaatcagatcataatttggataagtactttaagagataaatcagtttaaagtaattttatacgtaaatcgagcgctgacgtcagcacctgattttaccatctcccgattgggcgcccgacccagagtcatctccctaagaaaataccgtctcccccaaaaaaaaaaaagttctccaagaaaaaaaaaacctaacccatcataagaaaccggtaccggaaaaaatcgactcatcataatttatgttccattcatgttacaaagcacggacacctaactcgtcatttagaaagcgatgtagagatgcatcgtactaattaagttgccatgataaagaaaacggtccattaactagaaatagttgcacaaaatggatacaatttactcccagtatttcataaactacctttaaatatatatttatctcgagacaaaacgctgaattatttgtcagagaactattctggtttccatcaatcaatgtcataataacccccaaaacaatttttgccacatgggctgcgaatgtaacggagtacttaggcaattgacaggcctacatgcttttagggcatgtttagttggtgaaataaaaacttttggatgttacattggacgtgtttgatcgaatgttggaaggggttttcggacacgaatgaaaaaactaatttcataactcgcctagaaaccgcgagacgaatcttttgagcctaattagtctgtcattagcatatatgggttactgtagcacttatggctaatcatggactaattaggcttaaaaaattcgtctcgcgattttacatgcaaactgtgcaattaatttttctttttatcaatatttaatgctccatacatatgtccaaaaatttgatatgatgtttttaggaaaagtttttgggaactaaacagctccttaaagcactccaactaaaagtccttattacatgaacatgacatactccagtccttattacattaatgctctatgtaaagaatgaaagctcaggccagagagaaacggtcaacgttattggttgccaagccatacattgaagggttgaaagccccgtagatttcttctgttataaaatatagctatttctaaattcaaaattactctaaaatatagatatttcttcacccactccttcatctcaaccattcacaattatatcctatttatttttttcacctactttcttttcttaaataataattgtcttttactattcaattctacttatacttaatttttattttccataaaattctctagaaatgtttatattttgtaacatatggaatagattcactgttctgtaacgaaagagtcgcgtcaaggacacaagcacactgtagtgcagcaattgccagaaatcgatagccaacaaattctctagaaatgtttatcttttgaaacagatgtaatatgttcattgttatgtcacgacgagagtcgtgtcacggacacaagcacactgtagtgcaacaattgccagaaatcgatagccaacaaattctctagaaatgtttatattttggaacagatgtaatatgttcattgttctgtcacgaagagagtcgcatcaaggacacacgcacactatagtgcagtaattgccagaaaccgatacgccatcaaaacccatctgccatcaaaacaaatactccctccggtttcattttaattgacgttttggacaatgacatggtatacaagatacatctttgaccttatttttctattataatatatataataaataaatgcatgtttacttttattatagtactttaaaagacaaatctatatatgttgttctagttcctttaaactaaatatttttaaagttattgatagtctaagttataaaagtttgacctcaaccttgtccaaaacgtcaattaatatggaaccggagggagtattgattttcagtagacctttcttcttaatacaacactatggaaccggagggagtattgattttcagtagacctttcttcttaatacaacactatgcaactatgcaagtctcttgtaagagttctcattggaccttataactgtaattctgaaagagcccaaaactgaaaacaacaaaagctgcaaaccatctgtgcccaccttcttaaggaagatctcttttttttttctttcccagagaaatttattaagacagtttatcttcatggatacaaatacaacaacaacaaatcatgtttaagtttcactctcttcctatactgtttcccagcgaattatgtttaccaggtcttgacaatatatacaacatcaggtagtatataagtaagtacatatttgtatagggtgatgaggtgctcagtaacatctgtagcatatataagagattcatggcatgccatcgaccccttcctttatcacaatgccatgctcatgcatgcctcttttagcggagatgccagcagtactctccaagagcccagatggggaatatgttgcggtagttggggtaattgaagaagagggagcaattgaagcatccaacgtgttcctaacatcagtacaggagcacaagcaaaacatgagatagaccttaatatgttcacacaagtaatgctgaatcaccttagaacatccccaggagttaaactaattggccatctaattagtttcttttcaagtttccataatgacagttaaagatggaattgtatgtcttaaaatccttgtacagaaggtattgtatggtagatctcagttccttacatgttgcgaagtcctgatttttatctaatgtaaacaccatggttctttcctaaaaaccacttgatttgtgcgaggaagcaatagcccatggttcagttcttttctgaatgtaaacagaactatattgagcagtataatgtaaaatttagtctagtcatattatgtattacttgatgaccatagttcacatcagagaagctgggagaattaaaccccactcctgacatacgatgcattgtataggaggaacctttttttattgtgatgttcacttcattccataaaattactgctgaataaacaaactcaagttttccatgaatcgatataagacatacccccaacaaaactgaaatggggacttacttgttggggaaactcccctgtttctaactgcatattgattaattcttttgcagcacaatgcagtggggttggatctcgctccatcttacatccaaattaaatagttacagagatcattgataaacaagttattcctatcagaattaaattgagaatacaaaaaacatacctgtccagcataaattaaagtcagcattgcccaagcagtattcactacatgagcacgatcacctttgatgtttacatagacctgtttgatattacaaaaaaatgaaaatcaatggggaaatctgcaaaaggttaacatttccaaaaagtgtgttttaacagtgagtattaaaccaagccccaaatatgccaaaatttgtagaagtttgcagacttccctcataaaaagatttcttttgaatggaagcagagcttgttgcaaatgaaaatgaataactccaacatacacaacagatcaaatgaatgtgctgtgcttcaaatcctatgctgattcaagaatgaatgtttgcttggatggcttattttgaggggtgtgaacaagcatgcccgtacagccatattcaagacacaaaatcaacagggtgcacaccattactagtgttatgagcatttgttctacaattctactatacgttcagtaaatgccagttctagttgaatttaaagtcctgctttaaaaaaactatgctaattaacccaccattgtttttcctacatgccaattatcacaaaacttccaacaaaacgaaccatatatgtgtattcaaccataaaaattaaaatgaacaatcaaaagagctagagagataaaaaaactcaccttagtttcattagaaacgtggctttctccccatccgccagtattgagctgttttgacaatataaagtcgcatgctttcctgatggaagaactattctcatatgttcttccagcagcaattaatccttgtactgaaaagaaggccccataggtgaagcatacaccccaagtgcctagcctgccgaataaccaagttattgtgttacaaattgttactccctccgtcccacaatataagggattttgagtttttacttgcaacgtttgaccactcatcttattcaaattttttttgcaaatataaaaaacgaaaagttgtgcttaaagtactgtggataataaagtaagtcacagataaaataaataataatttcaaaaaattttgaataagacgagtgatcaaacgttgcaagcaaaaattcaaaatcccttatattatgggacggagggagtagactagaagagagaaaaaatatccactagtcagtaaaatgctcttgctacaaaccatgagccatctttgcgttgcgtgttctcaataaacattgatgcgtttctaacacattcttctatctcttcagtacggtaaccagggcatagttctttgaacagcaccaaagcttgaagcactgaggaggtacattctggatatctgccaatttatagaacagtatgagttgcaaggagttattttatctacaaagtgaaaaggggctaccaggatttatgtaattgcatcacttacggataatcaaccaccatatttggaaaactctcgcaaggcttgagaatctaggttggaaaaagagaagacttgtcaggcttactggaatggccataagaatttgcaataaaactggtgatttcttcaatgtaaatgtactggaacatacatgacgtgctgaatcaaatagtcgtgttttataatttgaagtacatgcatgttgctgatgttatttcaacatcataaattagattgattgtgttatgatgtaggcacaatcatggagtttttttgtgatgttagggtgttagtgtgcagaaactcacctctatccaagtagaagttcttttacattcatatgtagaaatggtaccatctttgttctgcaaggaaaagctaatacgttgacaaaatcgatttcacatcttaaaatcatgccaacaagaacgttctgaaggaatcacccagactaatgagaccatagttttcacaagattacatatgggggttagtcttgaaggagattacaatttgcataccacaaaagataggaggcaatcaacagcatcatacagcctttctctttcaatgggatccccaaccatgctactagatatctttgtcagcaacaatacagcctggaaatgaaattatgtaagatttctagggtagacataatagaaattatgcagaattgggaatatatcaaggccaatattttttatatgcatgagcttcttcgatgtgctgtcaccgattaggactggattaatatgacactagttttatacctcatttgcctacattagtaaccaggaaaagaacaaagaacataatgaccttcagtgcttctgctgtagtgtcagacacagcccacccattgtctgcagaggaaagagtccaagaaccctttgatctatggcgatgccagtaactttggtcaccaggatgattccttacaaccttcaagaaagattatgcaatttatgttgaatcttatagtcttatacagcagttggtttctaaatttagataatgaaagtatagattctgaacctgggaatttttcatgaattcgtgggctctctgaacagttgaagcatactcatttacaagatcagtggcacaaaacgcttgaattattaatgctgtttcccagctttggcaaccatcatatacctatcatcgagataacaatttatcacagtttttcatatctttgcctgagataaaatagctaactttctagaacaaaaggcacagcaactttagaaatttagctttatagctgttgtaggttggaaaccttcttggtatatgtttaacatatctactgatgtattccctaaatatgcgatgaacatcactgaaagtacaaccatccataggtgtataacctcgtttctctgttaaattaatgacagaactagatagtaacaggaaatctttcctagatgtaaagtatttgtcttagggtagtaccggaagtggacacattaaccatgttagccccacttccacatgaaatttgtcaatttatgcatgaaagacacaaaagtttagttacctgcgccttcatgccatcttctgaaagccacaagaaatcaggtaccctcgcaagatgcctcttgaatgcgtctgaatttggatcttccgcccagcagcagaccatgtttagagcctgaatattgtttaaagtaacaagtaataagaagacaaataccgcttcacacaaaccgtttgaattctgatgcctagctcaaatctgacatatcctagcctccccggaatcaaatttaacactttttttttttgaactagggcccatggcccccatttctcttactagaaatgaagagcaaagtaagaatcaaatttaacacttaacatcaaacatctgtaattgacgatgactatcacaaaggggaaaaaaaattgaagctaccttgttgacagagcaaatgcagaggtactgcgtgttctcgtcctcgtaatggatgtgctccatgagtgcatccaaagctctccccctcagcttgttcatcgcccagctgctcatcaccggctccacccacttgtacagccaactccacaccgcgttctgcagccgcgtcctcgggcagaccagatcctcctgccaccaccaaaatccagagcatgacgaacagttagaggagagagagagacaggggggatggaggaggaacggcgccgccggaaggagggcgagtcgccactgccgccgccgccgccgccaccggcggcgagaatcgccgcctcacgacgggccacgcctcccccaaaaagaagcacaattacgttaggcccaattagaggcccaacaaattcggcccagcctaaaatagtatctctctctctctctaccttggcgcaggcgctgcgggcctgggcccaatcgatggtgaggtagtggaccgggtatatctcctctcgcagtgccaggatggtcggtgtggtggggcccacgaacttcttgccgtacaggtaggccatgggcaggtataccatgcgggtcaggcaccaaaatttgcctgcacccaaattaaaatttattcttaaaaataaatttaatgaattttcttttaaacatacacatacatatcactacatacgtaacaccacgctcacaaaaacgtgaaatacgctctctaacatatgttttaagagacggaaactagtggcacattcatggtctcactaaaatcctgttaaaagtctacctacacatgcgtaataaattaatgaagttttgataaaatataaactctgagcactgccactaaattgttttatattgctactatttgatgtaggaggatatatacatacacaacacagtgtcctattaatatttacctggatgaaagggaaggaactgtggggctagccatagctcagggaagatggggttgtttcctgcccactcgtacactccaagcatctgtagcgaattcaaattaagttgacggaaacgaatcaacaagctacgtgtatttagttagcagcatgcactaattatatatacttcagaatatatgttaaactctgtttgatttttataagagctgcatgttttaatttggaaaggtcgatcttgatgaataacattgttagttatcatcggctgtattatgaatgactataaaaccaattgcgtgaaagtacttaaaaatataaatctttatacgattaatttgtaaatgctaaatatacctatatatcatttagttaaccattatattgctcaaatttatactactatatagcttagcattttgacattaaactgccccaataaaagtaattctttagcaagatttattatatagtgcattttcatgggattatatagtagacagaccgagagccatatctttccccactgtggaacaagggtagcgccaccatgcgatatgatccagatacgtcctctagccaattgctcattggttagaacttcgccgagaagccttagggtgatatagtttgaacatgtgccaaacatggtgctcgagctcaagaacgtgccctatccaccatcctcgttctacacacacatgtagatattgatgtcacaaaatatagaatatccaatgttttctagtaaaagcagatactttgatcaaactttcacaaaactatagatttaaaacggtgtattacaaactacaaatatttttagcattaaatttatcatgtgactattggtttaagattaagtatcataaaaacatagatttaataataaaattatcacaaaactgtaggtttaagggattaaaatcaatactcttgtgatgacaacgttattgaaatctaaagttttatgatatttcactttaaatctatagcttcatgataaatttgatggtcaatatgtagttctatgatacgtcatcttaactctatagttttacaataatttgattaaaatttatgtagtttgtaaaattttcttaatgtttgtttcttcatactagtaacatttaattgttacttacaaaaatatgcttatatatctgaactgtgctttaatttatgcaaaccaccacatttttgtttttatagtggtagcagtacttgtggacagtagagtaatagatgttcttctatacttaataaaatcttaaaccatattggcttattattttagggtcagcccgtatatagtttttttttgtttgtttctttgcctgatggttgtagatatatcgacatatctcctgccgatgctctggtgatatcgtagtgtccagtgatccagtgacatataaagcaaatatctgcatttattttggacagcaattagatcactaaaaccctcgaaaatatgaattaatttagctagagacaatcagacaaatacaattgaatattaattaccaagccaggcatgatgaacataacaccactgaagtcgccaggccagtgtccatcgtctgcttgcaaagaggagaactcgtcgagagctcgcctcaacgaagccatggcgatttcttcagtcacctgttccttctctccaagcttgacggccggtggaatactatcacgacgacgttgaagctttttctgttttgcaaactgcaacaaaatcgaaatgaatgtaacatcgtatgaaatgaaaccaagaaaatcatatcagatgaaagccaacactgtcacgacttcgtattggtgttaattgcaattaattaattagtaacttattaaataaacattcatcttattcgaaaatattttatatatagatataaaagataaattattatttattgataaaacagtttagaaaaaatatatagttattctctatggatagttaaacatacgtataaaacctaactgcatcatatattaaaaaaaggaaaagagtataaccggtcgatcgtcagttagccgatgattgagcggttaagtaacatatatgaacctgcatgcgcatgaggagatccgccgactcgcggcggcggaggcggtcatcggtgaactcacggcgcaccctctcgacgtcggcgcggtcctccggcgtgccgtggtcggggtcgagctcccacaccgcccgcccgaggaagccattcgtcgaccgcagcaacgcgccgccgccctcggccaccttcagcctccacatggtagctagcagctttagctatatgtatatggccgcgaccaccaccagcagctgccagccaatcaacgggtactcgccggagatggagaagaaggtgtagctaacttagctatagactatagagcatgcacacgcgcgtgtgtttggtttgctctttgcctcctggaccaggcctaccgatagtattggcatggctgctggctttttaaagggcttggagccaaatggtgccgcttgggataagctgatgatgtacgcggttgtccttttcatggatattctttctatggagtactaatacataaccccatcatctgtagccggatttctaccaagaaagagttgtattttcttaagccatacgttgattttttttttaataacggaagaaaattatgtcatttactcaacgagctatggcccattattgcatagatccactcaattctgagcacacaccaacaaatccataaaagcacatccaaataacactagataaaactctacatttattgaagcttatttgtaaatctctatccaaagttggcgaaaaattatataaccgttgacttaaggttcgacatgcagcgttcataagtttattgttctcatcacacctttatagttgtgcccaaaatcggagtcaataccttgttttgaaaagtacctgtacataagatttgaatagtgatttatccaaaaccatatcatttctgctaagccgtagagcctaacatatagaatatgctttaacaaggataagatatttggttttataatttattaatacccacaaaccaattcccaaagatataagatacactacatggaggatataaaaaaagaaatttatgctgctctctagagaaatttggtaaaataccaatccagaagtaaatgatagatcatctcatttttcataaaaaacaacaagcaatatgttgatttgacaaaagataaatttttttaagctagtataaatcaggtgtccatttttttaaaaaagatcaggttgtcacatgttgcagtcgaccactaataataaactaagttgtatatgatgaaaaaaaaagttagccgttgaaacatttaaaaatttatgaaacacatgatgaacatgttgctatcgcatttaagacattaaattttaatggttaaaacatactccctccatcccaataaaagtaaatataggactggatgtgacacattatagtacaatgaactggacagggatatgtccagattcattggactaggatgtgtcatatccagtattaggttagttttttgtgggacggagggaatatatctttattttatcaaaataatgtgacatgttgctctaaagatttaattataatgaatataacggtgtgatcggatcttatatccgataagcagtttaagagaaaaaaaaattcgaagatcgctatgaactatgcatcgtggatccaacggtacagcctttcctctcttgcctctttccctccctcgcatatttggtgacggtggcctcgggaggggctacctgatcagccgccgacttcaccgggagctagggtttttgaattttggtaatcttggatttagggaaattttttatttttttttgccaaaagtctattgtaatcatgcgtcttaattcgctcgtctacgaaaaccaatttttattaacgggcatattaaacttgtccatgtatgaaaaatcaattttcacgtacgattacgatgtccgattatgaaaatctttttttttacatatatgctaggctaggtggttgctccacccgcccgtaaaaaaatatattttaccttatctacagtagtgtgcacaccccagtaattataccatgtttggttgcacgcttcataagggattgcgaaaccaaaaccctaatttgaaataaatatataattaaggatgaatagtcctctaaatgacttacctcattttatcctcatcccaccaattaaacttggacacaaaacttagtcctaatcacggcggtcgctttacttgatgccaccaattaaacgtagggataagggcaatacttgcaccgagatgtgctttcaatggtcctgtaaataacacaggaaacgaccgtcatcagctagcaccatattgctggcccaacacacattcatttttaagtacgagatggttactgtgccacaactagcttactctctagtatcttcagccgctttcgtttcacataccatgaatataatgaattaatataatataacagtacctctcaagagtgtgcccttcgaaattgagtgccaaatggcccaaatcaatcagtacaacagtatataaaaatgcaaatcaattgaaagcagcgcagtcagcatgactgaattttttagttgattcaatttgctattcatagttgaattaggctgtgttcgttcacaggagaaaggggagattctgactcgttttccgcgcgcacgcttttcaaactactaaacggtgcgttttttgaaaaaaaattctatagaaaagttgctttaaaaaatcatattaatccatttttgaagtttaaaatagttaatacttaattaatcatgcgctaatggctcacctcgttttacgtatcttcccaatcttctcaatctcctctccctcaaatacagccttagtgttcagcatttatgctcgaacaacaacaactaagctaatctgaattcaaaaaagaactaaactaatcagagagggtaaatggttggattaccaaaatctaaatcttttatcagaattaaaagttaccatcgaatcgatggagatcggtctgaccggagttgatgcgtaggtctgactggacagatacctccgggctgatcgcccgttgcgcagccgtcacctgttgctgctgcagtcggtctgaatgagcagtagacgccactctaaccgccgcacccgagcaaaacacaaatcgaagactcttgaaagtagattaatctttattgcttctatgcgtatttacaaagtgcaagtgaaaaataggggctagggctcatgaataatgttgcttaacataaagtgtttgaacgatttatagctttggtcagatctgtacgttgaagacttgaagtcgtagttcctcatcgtttcacttatacttatacttatatacttatgtttacaaactaaaatttaatttttttaaattttagttttgaacttgattttaaggttttttttcatgatttattttgcaacattttcttttatatcgcttaggagtttgaactataaattaatttttgtttgctaacaaacagtagaaataaacatcaggataagcggaatgatgggatcgatagtatcaaaatgagaaatagttgcaacgtgtcttaaatcttcctatcttcagctagcctacagaactcaattcaatttcttattaaatatactatgaagagatcataagctgaacctattgctgctacatctgaatttcaatttcaatttaaatgctgcaaatattgtgaaacctgaagattccgaagcagattggatttatctagcgcatgctcgctcgattacttcatagctcaaaattttatagatggcgatgggaccgatcatcaatccccatggtgaattcacgtattaggggatgaagatggttaatatctaccatctaagaaaaatctaatggtccaaaacacatcactatcggggatggccggcagggaggccgctccactcccaccctaagtccctatccctcgcggtgacccgcatgcattgtagctagggaccaattatagactttattagtcgttttggctataaaattgaagcccaataaccagatatgtatagcttctaaccctagtcaacgtcaaccctccccttccccacatttctccaatctccacctccaccgcgccgccgccgccgctccagagtccaacgcgcgcgccgccggccgccgcctccccttgcgccgtcgcgcgggctcggtcccgtccccaaccgtcgacgagcgcgcgccgccggccgccgcctcccctcgcgcagtcgcgcgggcgcgctcccgtccccacgaaaccttatctctctctctctctctctctcccacgaacgcgacgacttcgatctcaaccccaccccatggctagcgacgagctccccgtggcggcagcggcaaccgaggaggaggacctcgtggagatcctcgacgaggggtcaggccggctcgacatcgcacggtacgtggaccacgtccgcgacctggcggcgggcgccatcgccacgttcgagggcaccacccgcgacagcttcgaggggaggcgggtggtggagctccggtacgaggcgtacggggccatggcgcggcgccggctcgcggccatcctccgggaggcccgcgccgcccactcgctgcggcggctcgccgtggcgcaccgcctcgggacggtccccgccggcgaggcgagcgtgttcgtggcggcgtccgcggtgcaccgcgccgacgcgatggaggcgtgccgctacgtcatcgacgaggtcaaagcgtccgtgcccatctggaagaaggaggtgtacgacgacggcgaggtctggaaggagaaccgcgagttcctcgaccgcaccaccaccgacggcaccaccgcgtcgtcgccggcgccggcgacgcggccggcgaagggcggcggttgctgcggccgcaaggtgagagtcaacgagagctgatgccaaccgccggatcgcaatcggacggacgtggttttttttatttttttattttaaagagaagagaaggaactacttgtatcatgtgattgtgtaaccggaaattaaattccgtgagaaaataatgaaacacgcaatgtctaaatttaaatttcagaagcaaattccaccaaacgtcataattgtaccatcaactttgccaactgagcacaacaaatcaatggttgcgtagtttatctgcctttatttttgtttttcctaacgaagaagcagagtagctgtcgcattcgcacgggagtcacaaagatgatcacaaatagtagtggctattaattgcttcgtttgatagatttgacaaattttgcgatattcacatatgactcatgtaaattttgctactaatgacagtttaatagtagtgacataactttgtggtatttcacattctttgctgagacaaggccacgtgattgcccaagattcagttgatactttgtgcaagccatcattgctgcatgaataaccctctttttaacacgagaaaattgcaaaaaacacaccagatatcaccttgagtttgagattcctcatatacgactattgttgcaaatacttcctcctaattctgacatttctctccaattagcattattaacgtgctttttttccagtttcagtgttgtacagtaggaattagcgtatttgttgataaacatgtcaataaacacattttcgaagcaatagaatcacatctaactcatctttctcattgaatttgtcaaagataccaaccacctaaccacatgaagcgagcacaaaagctcattttcgacaaccccgatatcagagcaaagactcgatataaaacggagggaatagtaaataagaacccatcatatatattgaattttttttaagcctcaaaagccaatgggttatgaatttacgataaccagtcttgacaatatatatatacaacatcaaattggatcgcaagcaattacatccgagatatgcaacggagctagaagattttgcttgtttttttaggtatagccgagtaatatttgtacagggcgatcaatatatctgcagcatgtataagagtttcctgccatgttctcatgcacgcctctctgagcgaagacgattacaatactctccaagagcccagatgggaaataagttgcggtagttggggtaattgaagaagagggagcaattgaagcatccaacgtgttcctaacatcagtacaggagcacaagcaacacatgagatagatcttaaaatgttcacacaagtaatgctgaatcaccttagaacatccccaggagttaaactaggccatctaattagtttcttttcaagtttccacaatgacagttaaagatggaattgtatgtgttaaaatccttgtacagaaggtactgtatggtatatcagtttgttactacagtaaaaaatatatcgtcgatgtcctgatttttatctaatgtaaagaccatggttctttcctaaaaaccacttgatttgtgcgaggaaggttatagcctatatcattttcagtatgctaattgaattgctagatcatggtttggttcttttctgagcatgtaaacagaactgtattgagcagtataatgtaaagtttagtctagtcatattatgtattaattgatgaccatagatcacatcagagaagctgggggaattaaaccccactcctgacatacgatgcactgtataacatgaactttttttttcttgtgttgttcgtctcattccataaaattacagttgaataacgaactcaagttttccatgaatcgatataagacatatccccaatggaacttaaatgggacttacttgttggggaaactctcctgtttctaactgcatattgattaattcttttgcagcacaatgcagcggggctggatctcgctccatcttacatccaaattaaatagttacagagatcatttgataaacaagttattcctatgagaattaaattgacaataaaaaaaatacctgtccagcataaattaaagtcagcattgcccaagcagtattcactgcatgagcatgatcacctttgatgtttacataaacctgtttgatattataaaaaaaaagcagtggggaaatctgcaaaaggttgacatttccaagaattaccttttaatttaatggtgtattaaacaaaacctcaaaatacgttaaaatttgtagaaatttgcactagtccaacttccctcaaaagatttcttctgaatggaagtagagcttgttgcaaatgaaaagtaataacttcaacatacacaacaaatcaaatgaatgggctgtgattcaaaccctatgctaattcaagaacaaatatttgcttgaatggcttcctttgaggggtatgaacaagcccgcccatgctcaaggcctaaactgagcagggtacacaccattactagggctgtgaggttggttctactataccttcagtatgtcacttctagagaagatttggggataaacaatgctcaattgatctagtcccaaggcaaaatattgtgtacaaggtgatgagaaattaacaaaacacccctaatatccttaacgcagtaaatgccagttctagttgaatttaaagtcgtgctttaaaaaactatgctaattaatcaccattgtgtatcctacatgccaattatcataaaacttccaaccaaatgaactacacaggcttattcaaccataaaaaaaatgaatgatgttgagaaagagagagaaaaaacttaccttagtttcattagagacatgactttctccccatccaccagtattgagctgctttgacattataaaatcacatgctttcctgatggaagaactattctcatatgttcttccagcagcaattaacccttttactgaaaagaaggccccataggtgaagcatacaccccaagtgcctaacctgccaaacaaccaagttattgttagactagaagagagaaaaattatccactggtcagtaaatgctctttctacaaaccatgaaccatcttcgccttgtgtattctcaataaacattgttgcgtttctaacacacttctctatctcttcagtacggtaaccagggcacagttctttgaatagcaccaaagcttgaagcactgaggacgtgcattctggatatctgccaaattaagtacaacgtgagttgcaaggagttactatatctacaaagtgaaatgggtgcttcacggattttctaagcacaatgttacttgcatcacttacggataatcgaccaccatgtttgaaaaactctcacaaggattgagaatctaggttataaaaggagaggacatgtcagggtccgcaatggcaataagaacttgaaataaaacaggtgatttcttcaatgtaaatgtactgaaaatacatgacgtgctaaatcaaatagtaatgttttataatttgaagtgcatgcatgttgctgatgttattttaacatcataaaaaagtttgattgtgctatgagttatgacgtaggcacaatcattgagttcttttctgatgtatgtttataaagcatatcggggcgatagtgtgcagaaactcacctctatccaagtagaagttcttttacattcatatgtagaaacggtaccatctttgttctgcaaggaaaaattaatacgttgagcagatggttttcacatctttaaaccatgacaactaaaactttctgaaggaatctccccggactaatgagactttttttttaaaccgaaggactaatgagactatgagagcacaatcaccatttttagttcgatttttaacattttggccacataaagttggcaacaagttgtgcaagttctgagcttggatttggatttcacagctgcacccatactgagttccagacaaaggttatgtaacatatttaagcccattgtccctgtaagtctggtgcgacagactcctttaacctctcctggttagcacaactgataacagtatacgagatatagtttccacaatatcacgtatgtgggctactctgaaaggaaattacaagatcaggtttgatagctgtatttaaaaaaaatgcataccacaaaagataggaggcaatcgacagcatcatgcagcctttctctttcaatgggatccccaaccacgttaatagatatctttgtcagcaacaatacagcctggaaatgaaattatgtcagatttctacggaagacagcgtagaaattatgcatgagcttattcgatgtgctatcacctattaggactagattaatatgacactagttttatacttcatttgtctacattagtaacaaaaaggaaagaacaaagaaacataatgaccttcagtgcttctgctgtagtgtcagacacagcccatccattgtctgcagatgaaagagtccaagaaccctttgatctatggcgatgccagtaactttggtcaccaggatgattcctaacaaccttcaagaaagaatatgcaatatatgctggattatcttataaagtagttaatttatgatttagattattaaactagagattctgtacctgtgaatttttcaagaactcatgggctctctgaacagtagaagcatactcatttacaagatcagtagcacaaaacgcttgaattataaatgctgtctcccagctctggcaaccatcatatacctatcattgagataacaatctatcacaatttttttccttgaataaatagataattttgtagaacgaaaggcgtgtcatgtttaaagatttagctttattcctaccataccaattgatatttctactgatgtaccccctaattatgcaattgaacatcactggaagtacaataattcataggtctgtcctggttcctccaaatttaatgaaaacactagatagtaataggaaaattttcctagatgtaaaacatttgtcaaagttatggtagtaccgacagtagacgcattaaccatgttacatattcaatttatgcatgaaagacacaaaagttaataacctgtgccttcatgccatcttctgaaagccacaagaaatcaggtactctcgcaagatgctgcttgaatgcgtctgaattgggatcttccgcccagcagcagaccatgtttagagcctgaatgttgttaaaaagaatcaataagaagacagatatcagttgatatatccaaacaatctgaatcctgatatgtctagctcaaatctgacataccctagtccctccagaatcaaactaacagtcagcaccaatgcaccatacatatctaataaacgatatgaccataaagaggaggagaagaataaattgaagctaccttgttgacagagcaaatgcagaggtactgcgtgttctcgtcttcgtagtggatgtgccatgagcctatccaaagctctccccctcagcttgctcatcgcccagctgctcatcaccggctccacccacttatacagccaactccacaccgcattctgcagccgcgtccgcgggcagaccagatcctcctgccatcaccaacacccagagatcattacgaacaattagaggagagatacagggacgatggtggaggaacggcgccgccggaaggaggcgcgtagagccacccgcaccgcgccgtcgccaccgtcgccgccgccgccgtcgcggcctccccactctaccacctcctcgcggggaattttttttatttataattttttttattaaaagttttacaaaaataattttccattttgaaaattgacggaagtagttgcctaccgccctctgggagggcgattttagggcgaaaatgacgtggcagacggccgttcgctctcgggcgacggccgtcaacgaaatttgcaggcggcccccttgccgtcctccgctagggcgattttatactgtgcggggggccgcctgcaaatgggcggcgagggggggcatggaattttgcaggcggcccccttgccgccctccgctagggcgattttgtactgtggggggggccgcctgcaaatgggcggcgagggggcatggaattttgcaggcggcccctttgccgccctgggggagggcgattttatactgtgctctatatttttgtataaatatcaatagttatcaaatctttttatagtgaaaactatacaagattaaaatctccaagactggtaaaatacaattttattattttttagggcatatttggattgttaccgtacaaatattttgttagtgccaaaatataagcaagttttggcactaccaaatatttggtaaggtaaaattgcatttgatcatatttggtttgctgccaaaatgtaaaattgtagtgaagaatgttctacataatctcaaatctagattacgtattaccaatgaataggcttccatttttgtgtgtggtgtgctagtgggaaagaagatatgaagaggttgccttcagattgtcaattatatagcgtcgttttcactgcaatatatgtgaactcaaagagatacattattcattagatgtgacaagacgatcacgcgtgggcgtgattcactttatgtcaacaggcagcgccgaaagttgatagtgataactcgagctgccgcttttcatgtgtgctgttgtggactgtgcgcgctactggatctgacactaccgtgaagcgccgaaagtgtgttgtcgtgagcataagttgttctagcaccatatgaatgaaaagaactatatagacgagacaaacacaagtagtactgcagtagtaatagcaaaagtagtactgctttacaagtttgtaagacaaaagaaacggtcacataaggactgaagaggtagaacactactgacgaggcctcttacccctgtccctcctaccctgcgccctaatgtgcccctgggagtacgtgagtcggtccgggggtacggcacggccaacccgtcctgcctgtacaggtgtgacctctggctgctcctgagtgtgcgcctctggagctcctccaagctgagaggagcctagtacgtcgtggtggtgtgcaccgtgcaagtcgtcgtcgtagaactggctagtaggaccagtcctaccggcgtgagacgaagaggccctagtaccgaagatcccggctgcaaatcctgctggacaaggaccatcagtttcgtacaagtatttaacagtagtaataaaaagtaaagtaccgtgtgggcgagggatcgacgctccgtgagaggaagagctggcgaacgcgcccgaagaggtggcgaacgcccctgcggagctcgcggaagcgccggtcgtgcctgcgaacgcgctcgaaggcagacgaggtcctgcgatgaggaaacgtgcagttaaaacatggtgacatattcgtgcaaaagctgaaacaaaaatgaactaatatctgggctgaactgtaccgtgcgaaaccggtgctgtaggtcgcactgctccgaagctaggggcgcttgaaggcaaacgaggtcctgcgaggatggaacatcaagttacgacggggtgatgttttcgtagaaaaacagaaacaaaacttaagaaacctctgggctgagcagtaccgtgcgaaacaggtgccgtaggtcgaggtcctgctccgacggtaggcgcgcgaggccgtggttgtaccggaccagctggaggtacgacgtccacggcgctgcgacaggagaagatgcgcatgaccacacgcatcttctcctgcatccggtcgaaggtcaccctctgctcaacgtcagtcaagtgcaaacctctgttcaacctcacttggactgcggtgatatcggcactgatatcccgtgcgtcatcagcctatgcaagatggaaataaaaaattcagtagttgtcctatattatgcaagataaatgaaataattgtaagaagtaatacaaattggacgtaccgccacgaagtagtctcggtcacggtgcgtgggatacgcgtccgtgacagcggcaacgtgcggctctggggcgtctggagtgaaggtcacacgcgcacgagtgcgaggaaggtaccaacgaaggtagtcacggtagttctcctccgtgtgtgggaagagctcgttgatcacctcctctgtagctaacacccagtcgtcaacgtactgctgtacacgtggagcccaaagtgcgcctgctagctgtccccgtcgagtcaacctgtgaagagaggtaaattatatggctcgatgaagtaattatcataaaaatttagaaatgaacaatccgaactcacgagtggtcggcagggaggacggtcggctgcacgttgcccggaaacacctgcctaagtccgaactgtctcatcacacgctgcgggcagtgaggctcaacgaaaatgtcgaacaccatcggcaggatggtgagccagtaagcctggtcgcgtgtgcacaaggacgaaagtcctagcggtgctctcgcagcgacggcctcttctgtgtacggctcccagatgacgtcgctcggctggagacggtcaaactcgaacacgaagtccgggtaaccacgtctcacctggacgtgagcgtaacgacgctgcaataaacatgatcggaattagacatgttatgtgaagaaaaaaaaagacgactgataaacttataacgcagcgaagttgcactaaccccacgtcgacaccagtaagtccccatcgtgggaccgtcctctggccactgcgcgctgcgaccaaccccgtagggtgcgctgtccaccactggtcgacctatggcaaacctctcggctgcccaaagctgaagcaacatagggcagccagcgatgatcgctcccgcgtcagtcttcgtgcacgcctcacagagggcacggtacgtggctgctagcacggcagaaccccagctccactgcggcacgtcctgtggctgagcatccgcgatggaccgtgcgtagtggaccagccggaagtccacagcgtgcccgtgggtgctagtgaacatcacccacccgaacaaccacaacaggtacgcctcaagggagcgtcggaccgagtaatcatcagcgtcagggtgcagaaggtccgcctacaattaagaatgaaatgttagtacaaaacactcatccggtcgcaaataagcacgtatgataataacaacttatttacttacagtgaactggagcaaccaagccttgctaggcccgactgtagagtacggaggaagggtgttggtcggtcctaggtgtggaaggcgcatcacctgctcgaagcgcgcagtgatatcctccttccacccaaaaacaccgtccacgggaccaactggtgctcccgccagcggtagcccgagcaggtacgacacgtcctgcagtgtcggagccatctccccacagggaaggtggaacgtgtgcgtctcaggtctctagcggtctacaagagcggcaaggagtgaccggtctgcatcccaccgcttcgctgggtcacggtcgtccgccgccgcctcaacaagcctacaaagtggtagaaggcctgccgcacgcaacctgtatagagcaaacttcaaacataagtacaacacaaagcaaagttgagttgaaatgtgaacatacgcgtaccaaggaacgtgacgggggtcgacacgcaaccactcgcgcgacgtgcgtggacggaaggtgccgagctgtgcaccctcgactgctgacaggaacgagcggtggttcctgtcaatcccacggttcaacagcgccggtgtgtcgtacgccataccttcatcaaataggttgatcagaaacatataaataattagttcaacataagtaataaatgttcataagcgaattactaacacatattaaacaagagtacaaacaaacaaaagtgtttagtccgaacactcatcacgataacattatgatacaacaccgaatagttcgcaatactactagtataacaatagtcggaggtactcattacaacaacattgaattgaaattacacgatagaagtatttagtccgaacactcattacatcacaacagcattttatttcctaaatcgaaagctttgttacaccatggaatcgcctgctgcgcgacgacaccttggccttgcgcgcctgcttgttgttccttcaccaggtggtcgcctaccatcacttgcctgtccagatggactagcatctgcgccgcttggaacttctgcattcttcgggcatttcttgtaagtatggccgcgcagatcacacttgctgcagcgtaaagtcctcccacctgcttctgactcatccatatcatttctgatgcgtctagtttggcgtcgaccctttttcacccttaacttagatggatctggaatataaaaaacttgggcactcagcgttgtgtaagatcctgagatcccgaacccatatatctcctcactccatgtatgaaagattgcttctttcctgaaataatttgagacgtacacattgggagatatgccacaatcaccggcagcagcaagaacgtgtgagcaaggaaggtgatgaagcttcggcttcatacaactgcaggtacatccaccatccgccttcaagacacattcctgcacggcttgcttgcgatagataccacgcctgctcctatcaacacacattatttcataccgatgcacttgtgtgccttgagcaacaactcgatgtctccgtgcctttttgattttatcttccatgtactttgtcactatgttgccaaacactatgttgttatcggccatggacggaccaattttcttgtatcgatccctaaagtacgcttgcgtgccgtgaaggatgaattcaacaatagcaaccaatggaagtacccgaactcctcgcattacccagttgtacacctctaccaaattggttgtcattatgccataccgagatccatcggtgtcgaacaatagagaccacttctccttaggctcattctcaatccactgagtgaaatttctgatggacgaccctgacctccttctcattgttggtgggtcatcatgtaatgcaccaagaggtatgggaggctcgtcacattcaactagtggtctgcgagattgctcatctgtttgcttcgttgtcaactcatccaacttgtcccacaactaattaaatttcttctcttggttctgtgcacagagcctcttaaagagctccataagatgcttgttcttgaattgcttgtagaaatttgcacccatgtgacgcatgcaccaccgactccgaacatcaggccacttagctggaagtcccttctcatcccaaccgttctgcaagtagtcaatagcccgcaacatacccgcatgacgatcatgtataaggcaaacattgggcctcatacgcaccactgcaatgtgcactctctctaggaaccagtaccagctttcagtgttctcactctctacaaatgcaaaagccataggtagaacctggttgttcccatcacacccaattgctgtcaatatctgacctcggtatttacctgtcataaaagttccatctatgcatagaacaggtcgacaatgcacaaaagcattgatgcaagcacccaatgagaaaaaggctctttgcagcatactctttgttcgatcatcaaccgatgtaaatgtatgtaggtcatagtacgtatcattattcctctgggcaatggtggctaacaaacgaggcaaattatcataagaagcttcaaatgtgccatacctcatctcaatgatcttttgtttggctctccaggcctttgcatagcttatggtgtacttgaatttgttctcgatgtgcctaataattgattttggttcaaagacaatgttaccaacaacactgctgtacatctcacttgccacaaaagctgaagtgatatttcggtgatacttctccaccccttgtaagtagcacttgtgctcggtcacaatgctaactttccaataatcattccatttacccttatatgcatggacacgccacggacaatcttccttcatgcacctcacttcatacacataatttgttgacttgaccaccctaaactctctctgcaaggaaactgcccaatgcttcaccgtctccttcatctcatccttatgagcataccttgcaccctcaattacctcgttctccttatactcccagggtacatgatcaccctctgatataacaagtccagagaagtcctcatttgcccaatcagtggccattacatcaccttcctcatcggatgatgcgtcgtcgtccacttcctcattatccgaatcttccctctccatttcatcaacaattataccgactctctccccctcatccgccatgcccatagcctgttcctcccttcgttgattttcctcattttgcatcgatggtccaacaacatcccttgcattgataggaccctctacatcttcggtttgcattgaaacatttatatctttctcttgtaccgacacaaatataacgaggggccatgaccgttcaaaagccatttccacataccgtctccaagcatcagtgctgtccatcggcattagttcccaaaaataaccttctgttgcacgactcactacaactgacactgacattgtgtagacttcttggtctattctaaatcctctcaacaaccaactataaattgactgaaatgttctctccgcaggcctatcgatgcccttagatgtcattacaaaatctgacagatcaacaccatctggaccaaatctaatatttccttcaccgtgaactatctgaaatgtgaccttacttgacattgtgcctgatgaaaacaataactgtgttaacctcgcatttctgtactacgccctaagttacattctctacaatattgttctctaaatttctaaaattacgttacattcttcagatcaaactaaactacatcttacaattaacactactgtctatgtctcaattcatactattatattctatgctctggatctacacatatgtgctgtgtgctacagatgtgctaaaatatatggaactaaaactaaaacgcaacatatatactcaaacataacatattagtacaaatgcaaaagatgtatgggagcatacctgtgatgaattgagcgaaccagcagggcttcgccgctccccttctgctgccctcccctctctctctttcgttttttttggatttttagtgaatataatgaaatttcacagaggagggactgggctttataggggggaggcaaaaatcgccctcccctagggcggcaagggggccgcctgcaaaattccatgccccctcgccgcccatttgcaggcggccccctccacagtacaaaatcgccctagcggagggcggcaagggggccgcctgcaaaattccatgccccccctcgccgcccatttgcaggcggccccccgcacagtataaaatcgccctagcggagggcggcaagggggccgcctgcaaatttcgttgacggccgtcgcccgagagcgaacggccgtctgccacgtcattttcgccgccctctgagagggcgatttttaaaaatcgccctcccagagggcggtaggcgactacattcgtcaattttcaaaatggaaaattatttttgtaaaacttttaataaaaaaaattataaataaaaaaaattctcctcgcggggcactcctcccccaacaagaagcccaacaaattcggcccggcccaaaaattaccttggcgcaggcgctgcgggcctgggcccaatcgattgtgaggtagtgggccgagtaaatctcctctcgcagcgccaggatggtcggcgcggtggggcccacgaacttcttgccgtataggtaggccatcggcaggtataccatgcgagttaagcaccagaatttgcctgcacaaaagtaaattcagttcaaaattaaagaattttcatgaaccttaagtctgatataaactccaggcattgccattaaactgtttttgatttgtgtgcaactagctactatttgatgtaggagtatacagtatgattattactagtatatatatacctggatgaaaaggaagaaattgtggggtcagccatagctcagggaagatggggttgtttcctgcccactcgtacactccaagtatctgtagtgaatcaaattaatttgtccgaaatcaatcaacgcgttatattataagtcgtttgatttttttcataattaaactttgtcaagttggcccaaatttatagaaaaatttaacaacatctaaaatatcaaattagtttcattaaatataacattgaatatattctgataatatgtttgttttgtgttgaaaatactactaaatttttatataaaattggtcaaacttaaagaagtttgactagaaaaaagtcatatggcttatctatacctaataagaaaaataagtaaggtttcctgttctctttccgtccgtttttttcttttttcgctgttttttcttttttatacctatatatataataattaaggtttccggttctctttttgtccttttttcttttttcgctgttattttcttttttccatcttttttcttttcctccgtccctttttttttcgggcttaggtttttttccgccgtttttcttttcttatttcgttttttctcctttctttttgccttttgggctttttttttctaccttccctctaatcagggttcaaaatttcggaacgaaatttacgaaatttcgggtctattggtgggtcctgataaacatgagctccggtcaaaaatttcggcaaaacaatgttcatggtaaaaatcctcaatttcctatcccctcctcacttatataccaaaggctgctgctgcttcgctatcctccgacagctcgcccagcaggcagcaggtcgccatcctcccaagctagcgaacagcggccgcggcggtggccggaaccggaggcggcgggttggttggagtggccggcggcgtctccgtggctcttcggcaccacgacgacgatacaagccgcgggcctcgcatcctccgtttggctagagttgccgctggcggctccatcgctcttcggcagcacgacgatgaccggacgacgacacaagccgcacaagcctcgcatccttacgtgttactgtgtttcaatctcctgttcctctgctttggattgaatagactcgatgctcatctatactctgatcttggtaaaatttctttatttttattgtttaaattcaaattttgtttgaaaattccgttcgaaatttctgaaagattttcgaaatttcggtgacccctgaaatttttccccttcccgatagattgaaccctgcctccaattcttacccaggcaaatgattatctcggttgaaattttcgatttttctaacttttttgtgaatttagtcaaattcagttaaattgtgttaaaatttcaaaaaatggtctaaaaaacgccgaaaatcccaaaaatccagaaatttcgtttctaccaaaatggccgaaatttttggcgcgaaagtgaaaaccttgtactataaaaccaatcgtgtgaaagtactttaattaaaatatgaatcggttggtacgattagaaagtgctaaatatacctatcatttagttaaccattatattagtcatgtttatataaatcaagatgtttcgaaagtaaactgaaccctacaaaaatcaacgaaagcaattgtttagcaaaattcattattgtgtggattcatgcgataatatagtagacagaccgagagccatatctttccccattgtggaacaaaggtagtgccgccatgcaatatgatccatatgcgccctttggctaattgctcattgcttgtctcttcaccgagaagcctaagggtgatatagtttgaacatgtgccaaacatggtgctcgagctcaacatcaaactgccccatccaccatcctcgttctatataacacatgcatgtgcagaatttgcagtcacaaaatatggaaaatcaaatgtttttaaagtgaatttcacaaaattacatattctctaaccaagctattataaaattatatatttaaaatggtgtatcataaaactatagaattaatattaaatttatcgcggaattgcagatttaagagcgagtatcataatattatagatttaataataaagttatcacaaaattataggtttagcaccaaattcatcataacttattactctaatataataatatatagttcgagtaatttaaataaaacctatagtcttgtgacaaaaacattattagatatgtacttttgcaatattttaatgataattttgatggtaaatttgtgttttgtgatacgttatcttaaatctatagttttgacacagtttggttaagttatatgtagttttgggaaatttactcagtgttttttatactaatgacatttaattgttacttagaaaaatatgcttatattttgtctgagcaaataagtctgaactcgtgctttaatttatgcaaaccacccatttttgtttttataaacattcgtactgcaagtactggagtaacacacgttcttctataattaaaattattaaaccatgaatacatgagcatattataattattttatggtcagtcgtccatatatacggaaaaaaatatgcctgatggttatagatatagcgacatatctcccgccgatgctctggtgatatgatagtgtccagtgatccagtgacatataaggcaaatatctgcatttatttgtacagaaattagctagatcaccagaaattaaaccacgaaatagctaagcataaattatttagccagagacagatacaatttaaatatactaccaagccaggcatgatgaacataacaccactgaagtctccaggccagtgtccgtcgtctgcttgcagagaagagaactcgtcgagagctcgtctcaacgaagccatggcgatttcttcagtcacctcctccttctctccaagcttattattgacgggtggaatacgataacgacgacgttgatgcttgttttgctatgcaaattgcaacacaaaaggaaatgaaaataacaccgtatgaaatgaacgaaaccctgcaacaaaatcaaatgaaagcgaacacaccgtacagtttcatattggggtaaattgcgtttctcaaaaagtattggagtaaattgcagtttaactaataagtaattattatataatatatacaaataagagatatagaaccattcgtgtttattactcccttttttctttaatatatgaggtggttattgattttcgaaagatacagagccattcgtgtttattacttcctttgttctttaatatatgagattattgatttttaaacatatatttgaccgttcataatgctttctctctctatatataagtcgttcttaatgtactgcagtgatgatataaccataaccaaaatagaagtatataacaactgaatacttttattaataaacgaatagcgacattatatatttaaaaaactaagggatgaatgagcgtatgtaattaatatatacttgcatgcgcatgaggaggtcagctgactcccggtggtgaaggcggtggtcggtgaactcacggcgcaccctctcgacgtcggcgcggtcctccggcgtgccgtggtcggggtcgaactcccacaccgctcgcccaaggaagccattcgtcgaccgcagcaacggcgtgccaccgctctccgcaaccttcaacctccacatggccgccgccagtcagtcagccaatcaactcgccggagatggagaagaatggccacctaactagctccagctagctagagcacaggttttggattaatttgctcctaggcaaggcatagcaatacctagctactcacatatggctggcttttaaaggggaggaccttggcgccaaatgatgccacgtgggataactaccattcgcagtgtgtcccactgtaatgctgtgatgaaataagttaatttgtacgagatttgatattttctagcactacgtacgaatctgtacagacgtcgtagtgctagaaaatgtcacatcttatattagattaacttattttaggatggcgtaggagtccatgtcataaaattgtaaaacccgatttgacaaaagtttgcttactgttcatatttattttaagaaaaagaggcaggacagaacgagtagatttttttctatcaaattaatcatgcgaattatctgcggtccaatctgcctgtcgactgaaattataagtaaattttctgtcaaatctgatagggaagtttatcttctattgttttgtccacgcaacatattatagctattttaaacttgtgcatgtgtgtcatttagatccccaaactctcaaaatgcattttcggatctctaaacttgtcttggatgtcatataggtccaaacgagctacaacccactctatgcgttgatgtggcatgccacgatagtgcctacgtattagttggacccacgtgccaatcacatagaaaaataaaattaaaaaaacatattttctcctctctactttagatttttttctatctaccttatatgagaaaattatggtttttaattatatggattccacttacacgtaggcaccaccgtgacaataccacgtcaggacatggagtgggttagaactcgtttggacctatataacacccatgataagttcaaatatctaaaaatgcattttaggagtttagggacttagatgacacacccgcataagtttagggaccgcccatatacttcactcctaaataaaatctcaatcgtctcactctcacatgcatcacgctctgattgtgttgtgaaatctaactattcaagtataaagataaaaatcagttttcctcaaaaagaaaatgaaaatccagagcgataagcttttactagatttttaaattacagtatcagaacatacacatgtagaaaatgaaaagaggtgcaaaacaaaggagtcaaatacacggcaagaacaaataaaagggtgtatggaacaaagtagccatgaaacttataaaacaaattacagtgtgcaatatatatctagatatatatagacgcaaagagaatcattgcagcggaattattcatgtaaaattcttcatgcccttaccctagctatttaatttgggaaaaagtacgaattacctcccgaactatcacgatcgactgaattacccccctgaaccacaaaaccggacattcttcactcataactatgtaaaccggacgaattacccccctcgacctaatccacggtgattttggtctacgtggtgtacgtgtaacagtacagtcagctttctatttataaaaaagtagtggggtccacctgtcatatcttctcatctcactctccgtctctctcactcatcctcccccaagcacgcgggtcgagcggcagcggcggcgcgcacggcgggcggcggcgtgggacggcgcggacggtcggcgcgcgagggccggcgacgggcggcgtcgaggtggcggccgcgcgggcgcaggtcgagcggcgcgggggtcggcgcgcgagggccggcgacgggcggcgcgaggtggcggccgcgcggtcccaggtcgagcggcgcgggggtcggcgcgcgagggccggcgacgggcggcgtcgaggtggcggccgtgcggcgcttgcggtcggcgcgcgagggcaggcgatgggcggcgtcgaggtgctcggcgatgacctcctccgcctcccttcccccgctgcgctggtgcgtgccacgctcgcggacaggtccttccgcgctcgccaccacacgctgccgatcttcctctctgccgccttcgactccggcctcgttcctcacctgcagcggctgggccttcgcctcgttcctcccaaggcgccgcgaagaagctcgcagtcgccgaccccgcacacctcccgtccccgcgacgttgccatcctcccatccccgcgccgccgcccaccatgagctccggctgcctcctccgcgggcggccaaagggaagaagagggcggcggcggctggatttaggggaaccagctcgcctccgtccccagccgcgcgagcgagctccgccgctggccgtccgagtacgcgcacgagagagagagcgcaatgggctgggagaagctggatgacaggtgggcccaagggattttttttttctgattaggctgccacgttgatgccacatgtgatagctgaaatcaaaaccgccccgaacagggttcagggattgtttgtccggtatatatagtttagggtgtaaaatgtccggtatttaaatttagggaataattcggtcgaccatgatagttcaggggatatttcatacttttttctttaattgtggtcttacaattattagtactggcacataaaatatactggcgataagggctatgtatacgtactggcgtatgtatatctgcgggcgtgtgtgttttatgtgattgtaaggaaaatcgatcataaaaacttataaatttctaagtaaaagaatgaaattaacctaaaacataatttgtctttttactttggaattatacaatgcaatcaattcctccacttagggcccctttgatttgtaggaaaatgtagaaattttggaggatttcaatcctatagaaaaaaaatcctatgaaagctttgaaacaaaggattgaattctatccaatcctttaaaattcctatgaaatgggtaatcctatgcatatattggaggaaagttagcaagaggtataacctcttggaacatttcctctgagtctatctttctcatctgattcctgcgtttttcctgtagtccaaaataatggccattctggtatttttcctgtgttttacagttctctgttttacaattgtattcctgtcagaatcctgtgtttttcctatttctctgtttttttattcctatgattttaaatgggcccttaattttttctttttttttctcaactatgagaaggggttcagatatggaaaggaaaaaggttgaattgaacaagtgatgggactgacatgctctctgtagcgcctagcggcagtgaaaacatatgagaataatctgagaattaagcgaagcatgcacgcctaacatgctagcttggggtggtgtttgaatctcctgaagataaaaatgaagattaagtatttcacgcaaaatgagatggtagtaacgtgtgttaattaagttttaattattacaagtttgaaaaatagattaatctgatattttagggcaactttcatatagaaagttttcgcacgaaacacatcgtttagcagtttgaaaagcgtgccacgagtatccaaaatttaatccaactcttctgggagaatccaacgcagcctttacactgtatgatttgcagacccgaaacctgaagattattttacactagcctcggctagctagaataaatcaaacgtcaagaattccatgaattttgagactttcggtataaatatggaacaacccacttacatatacagcgaggacattaatcttttaagccacaactcttataaccgtgtttactcgtggagcttttctacaccatattagtaattttatcagaatggctacccttctgtcgatagaaaatctattcccaaatcttacagattttgattcactagatgtgcttttcgattcatgctctagatgttttttctccaactctgacatcctccttttcttcttcaatgccggtgacaacccaaactctagcgaagagccaataaatgagggtcccgggttagagtggggatgggaggggtggaaggggaagggagaagaagggggaggttgccgggcttagagggatggttgtggaaggtggaggcgtcggtgccggttggtagcagtggaatagctagcttgtggttaggaggtggtggctgatccaacagcgaggagccaccagagacaaggaagatggcggggtaggggcatctcgctaccgatggctccagaagggaggagaggagggggggggggacgcgtgagagctaagcagcgactgtatcgtgagaaaggggatgaggaggaggttttgtgggtttctgtcgtgagaaaggggatgaggaggaggttttgtgggttttaatttgttgctctggcgcaaatcttaatgcaattgggtggtctaaactttgcaggatttatagaaggattttctatcaaatgatgtatagacaacctataattttatatactgtagtgtgttatatctcatataatctaacatgtgtgaccctttgtcagataatatttagtgttttttttttggttcttctagacgaggagggtaatagggcatcacggctagcagatggcaagattcgcctgcctttgccattagcaactataaaaagagatccgccacacttaatagtttctaatatgcatcagcatccatataattaaacggatagatacatgtgcacccgtaaaccgtccatgtcggttgcatgcttcataaagataatgaaacaaataaaataaaataaaacggagatatatataatgaaggaggaattaatagtccttaatgtgggatgcattaattgcattacctaattttatcaacgtcacctattaaacttagacataaaatgatgatgatgatgatgatgatgatgatgatgatgatatgttcaccaattaaacttagacacaaaacaatgatgatgataatgtgtttttaagagtactgcgcaactgccatttcgtcctcgtctcaccaattaaacttagacacaaaacaatgatgatgatgtgtttttaagagtactgcgcaactaccatttcatcctcgtctcaccaattaaacttacacacaaaacaatgtttattactccctctagatttaataatacttgtcgttttaaataacgatacggtctttaaaagataactttgaccactattttttatgagtaaattacactagcggtccttaaacttgtagcgaggtttcatttagatccatgaacttgcaaaacgagtattgagatccctaaacttggtttaatgtatcatcccggtccaaagccccatttgactgtggtcttgcctacgtggcatgccacgtgggcgatgacagggatttttttttattttttctcccttctaccactggcccacctgtcagtgggcttctctgacctcactttccctcttctctctatcctctctctctctccgtgcggttgagcaggacgtatgggcagccagcaaccgaagcggcgacgggcggggcggccggcaagaaaggagcggcgcgcgggtgccggccggcgggaggagaggagcggcacgcgtgcacgggctgcggttggagaggagaggagcagcgcgcgtgcacggacggcggtcggcgagaaaggagaggcgtgcgggtgaggccgacgggaggacgcgcatgcacgggcagcggccggagaggagaggagcagcacgcgtgtgggggaggcgtcgctgaccacacccgggaggagaggtcgccgaccgtggccacgtgtgcgagggaggcgtcggccatagagcgcgcgagctcggtggcggagatgaagtcgttgccgccgccggcctccccgccccctcaccagcctcgcctggcactgtttttttccaccgacctgctccgccagtcggccggccgccccgctccgacccgcttgtcgcctacttcggtcgccggccgcccgtcccgcttaaccggccgaagagagagaggatagagaggaggggaaagtgaggtcagagagaagaggagagtagtgaggagagaagtgggccccacctgtcagtgtcaaaagggagaaaaaaagaagaagggagaaaaaataaaaaaaatccatgtcatcgtccacgtggcatgccacgtaagcaagaccacggtcaaatgaggttttggaccgggatgatacattaaaccaagtttagagatctcgatgctcgttttgcaagttcgtggacttaagtgaaacctcgttacaagtttaagcacctctagtgtaatttactcattttttattataatatgaatagaagtgttaagaaatatatgattttattgaagtactttttaaaactaatctatccatatagtctccatatttcaaacataaatattttagaaattattcataatcaaagattttaaagtttgaccttactcttatccaaaacgacaaatattatcagcccggagagagtagttgatgatgatgatactccccccatcccaaaaataacgcagttttggatttttcatgtagtacaacgtttgactatctgtcttattatgaaaaaattaaaaaaaatagtcacatataaaatactatttatgttttatcatctaataacaataaaaataactaatcataatgcattaccatcaagtgtgggcccttccaaaatgagtgccaaatggcccaaatctattagtataggaacgctcaatattcgttcaaaaagaatgtgaataaagcaaatcaattgaaagcggtcagcatgtactgaattttcagtaacggaatcagctggtagctgttgttatttatgcacttaattaactgtaaacccccacatatttattggtcttgcaatagtgatgattgtgattctgcaaataagtccaccacatttgcttttacatgttttataaattagtcccaatattttttaacattatacaatagtttaatatttgaataacatatactatttaataagcgtggccattttatctatatcaaatgacaagcatttggctactaagaaaaatcctttttgtaccaacaactagagatgacaataggaacccgttattcgacaccgatgagattatactctaacagaaactaattatgttttacatctatggatctgtcgacaggcgaggttgtttggttatccatatacttcctccggtttcattttaattgacgctttggacaataacacgctctagtttctaattttatgtttttctagtttctttaaactaaatatttttaaatatttttaaagttattgatggtcaaagttataaaagtttaactttaaccttgttcaaaacgtcaattaatatagaagtagagggagtacctctatcatcactagcatgctgtctcgctgctgctgatgcatgcacaggacaataacgtcattgtggtgaactacaaggcggcaaattggagcgtaaaaagatttgaaaatatacgttatttttgaactttttgcaattatgcacgtgtttttgaaagatttatggaaatatacacataccacggggcaggtgcgtgcgaccgattcattggcgcgacgcagacgcgcatgcacaagattgatggccaggataatcctacgctgcgacacagcgccaccgcgcaaaattcatctccaaaaatttgaattcaaaaaaatcagtggtttcgcagttaccgcacggtttggaaggataatcgtgatattcgtgcagttatcgccggatgtgtgtagaaattggggataattggaagaatatataggatacttccaagtataacttttgggtgtaaaatacaaaaaatcggcatgatctttctttattgtggatattgaagcaactcaacggtcctgtttgggggagcttgtcccagctgcagcttttcccaaaagctgcttctgctagaaactgtcccaaacagtccacagcttctaagaatctgtagttacagattctgaaaaatgaactaagaagccagaagctggagaagctgggtttcagagcttttccagattttcagaagctggctaccaaacagctgaaacattttatagcacaataattcaacaacaacaattcaacgacctcatatttcaaagcattatgaagtccacataaagctgaaataatacagtccacaatatattatccacgactacaaatatgattgttcataggataagcaagcatcaagaatatagaaagttgtagttcgaaacgaatgatataaaaaaggacaccggatgcactgaattcactactgcttaattaccaatatttccaacagtcttttcaaacagaagtactcaacaacttaccaaactaaatcttccacaacattcaacatttgcactacataatttcattcaacattccacatttgcacttactatacccgaaccctagaaacattcaacattgaactaaagacacaacattcaactatgtaaaccacggtttccacgcgataactgctataggaaccacggttaccgtgcaatttgggacgattatcaccacttccttgcataaaacacagatccactgccagcggtaaccgcgaggaggatgagggttacctcgaggcacttctcctaggcgataacctcctccctagttgcggttacctcagaaaccgcgcgattttcatgctcgccggctcgtatgcggcggattaggcgccgctgctgcctccctcaccctgtgccaagtctgccaacagagaaaggggggcgcctagttggcgcgtgtgcgcccccgatgcacgttttccgggaataattaactatttgccacttacgagtggtgcaattaattatttgccactggacccacatatcatagacacatgagggcccacatgtcatagacagcgagtggcgaataattaattgccacatcttaaaagtggcatggagttagatgtccccgttttccgggactaaaaggtagttaactattcaattagttttagataattacagtttgagataatgacggtagtagttaggatttttttaaactaacaaattgaaaagaaatctatatctgaagtcaaattttcaaaattttaaatctagatttgaaaattttcactcgaaatttgaatttttaagtcaaattttgaaaactttcaacttttcatctcaaatttgaaaaacattcaactcaactttgaaactttcaacccagatttaaaaactttcagtccagatttgaaaactttcaactcatattttaaaacttttcaactcgagatttgaaaactttcaaatcgagatttgaaaactttaaatcgagagttgaaaactttcaaatcaaatttgaaaaattttaagtcgagatttaaaatctttcaacttagatttaaaaactttcaattcggatttgaaaacattctactcagaatttgaaactttcaactcgaatttgaaaactttcatctcaaaattaaaaacatttatcttacatttaaaaatattcaaactaaaaatttaaaacttctaactacaattttgaaaacttttgactccaaatttgagttgaatcatgcgcttagattaaaagaagttcatgaaaaaaatcacaaaaaaaatatccggaaaagaggaaatcatgcgtatatggaaaaaatcgaaaaaaaaacctaaaagtcgcatgtgggcatgtgtgggcaacgtgcgcgagataaccaactgacgcgtctgcgcgaattagtttttctgcggaggaagagcgtgaggagagcccccaacaacccaggagatattttcttctcttatgagccttaatgcgctatctgtaacagtgccaaacaaggcccattccatttcttttcattttctaattgacttttggttttgccctcaaatttgaatttatcttattctttttcaaaaaaaattcttcaccatctgccactacaaaccaagaactacttccatgaatttttttcaatttttttcagaattttgaatttggacaaatttcatcaaaccctatcaccggtaacccctatggtatacccccccccccccacggttaggacgataaccgcagtaaccacgtggttaccggcgataagggaaaccgtgagttagacataagcagttgggtttttctataacagaagaaatatgccatcaagtgatcattaactgggtcatttcaaaaatcattaaattagattgtagttggtaatttggtatgctcccccggtagcccacaatgttaaggttaaatttgatggtgccattaaaaaagggttaattggatccatgccactgcaaatatgccaattaaaaaatgccactaatattcagaatatcggctacatatgccactgaaaattggagaaattggaaccgtgccactccatcacattttccgtcaaaaatccctgttagcccccaactgcacgtgggccccacctccctcccctctcttctctttccttttcctctctctccaccaccatagatgcagtaggaggtgtcgtcgccgtcgtcgtctcagagatgggggtcgggccgggctgcgcctgcgtcgtcgtcgtcgtcaagcgcttcatctcgaagccgggctgcactttgtcgtcgttgtcgagcgcctcgtctcggagtcggcgggccgggctgcgcctgcgttgtcatcatctactcccccggcgagggccccggccactgcccatgtgccgattgccaccccgtccaccgccatgtcgccgtccccaaccctcgccgctgccgtcaccgatctccttcccccgtgccgctcgtcctgccgggcttcgccctcggctccccggtcgccgattcccctcagcggtcgtcctcctgggctcaccgtcgtccatgccggagaagcttcctggccgctgattcccttgacgacggcagcgagggtgccacgtccgccggcggggacgatgaggaatggacaggtcgcggcggctgttggcggagaagtagcgagagatagagaggggacccctgactagctgcagtaggcagtggcaaggaccagcgagtctgaggtggagtgctcaccggtgtctatggcggagaagcgaagaaaagaagaaggagacagataacggcggttgacataaaactggacggaagtgacatgattccaatttccctaaatttcagtggcacgtagccgatatcgcgaatagtagtagtattttttcgaattggcatatttacagtggcatggatccaattaacccttaaaaaattaccattttagataaatgcatttaataatcatctattcgtaatcatgttacaggtattcttgtcaaatctgattcgtgccatttgtggtcgtcgtcgtctggcggcattgacatattttttttttcgcgaacgctcaaaaaaatcgcacgttaatatattagaagaagatagcagagtttagttacacaacaaacattcagaaggccgttgccaggggccaagaggaaaaaaagaaaaaaaaacaaatacggaaacggttagctactgaaaaagagaactcccggcggcattgacatattttcatcgatccgtctttttgtttggacgcaaatgtcccctcaagctacactaaaaccgaccttaaagagcaggatgttactatggatttgaagttgatcgaatcactctacactgacgtaaacccatggtggtcgctagtcgctattactccttaggtcatgtttagctaatgattaggaaaataattttccacccaccaaagagtttcttcaaatcctagccatccattatccctccctcatttcatcctagccttcatccatttccctatctcaatcccactactcttatcccattatccaaacacacccttaatgtttcttcattttttttaaccttctcctaaattttttttaacccgttgattttcttcattttattttctgcttaaccttttgtatttttttactagcaactgaacccgaaccaaagaatatttcttcatacatcaatatgaccattttctttatctatctaaagagaatcaagatattagaacctgaacttgttgcttctaccactgaattttggaataattaatgttttgccactctggatgggtagtgtcaatagatttgccgttttgtgagagatgcgattgtgagagggattaaactgatctattaaaaagtgttaaaatgttaaatcccctgaatttcaatttcaatgctgcaaatcttgttgaacctgacgatccggaactctgaactgtctaaagaaagtcacgtgggccgtgtttagttgcaaatttttttttcaaacttccaacttttccatcacatccaaactttcatacacacacaaacatccaatttttccgtcacatcgttccaatttcaaccaaacttttaattttggcgtgaattaaacacacccgtggttggcatctacggtaggagatctgattttatatgacacatgtctgtcgcgattgctctgggccggacgcccgattcgggtaaaaatatatcgggcaccctcacacccttccgttgtccccttagcctctagtgttaagccaatagcttctctctcctctcttctaggtacacatatagccacctctttaataaactataaactatattttctcttaaattgcttatctgattaaaatttgattgtaccattgaattagttgcaattaaatctttaaactagaccacacataataatattctgataaaataacatttagcaagtttatgggcaaagctaaatttatagcataagtagtattttaatagaggtgtttggtttgtagcaatcgaaactggcccagtaatacgaattggctctgcatttctgcaataatgatgtgtttagctgatcaagctggctatgtgtagaaaccaagtgctagtactagttagtggccttgatgttgggatcgatcgatgtctatggcaactagcaatcataaagtcctgatttagagagagatcgatgtagtggttttcatttctagtttaatgtttggttgttcattgtcctattcagcctaacatgtaggcctgttattccttttaaatttttgggtccatgagcaccacggaccaaaccgctattaaaacagacgagggacttaatttgctccggttttttaagacggaggagatgttacaccggtattgcggttaagggagaggcgattaaatcaagggatacaagttgagagacacaaaatagacttatccacagatataatacggcccgaattctcgcttgggcgtgcagcgggtaggcccatgagaaccaaagcccaatatcggccgttcactctgggccacggcccatgcccgacggccgacgtgtctcgccgtccgtcggccacgcggcggccgccgagacgcttccaggatactacacgtctctgcacacgcgtcagcaagctcctgtgcttgcaccgtctacttatctcaattctcaagctctcagctatggagtaaactatacttgcatcttgggtatttttttcagagcaaatcgagatcgatccgacagaagcgagcgatcatggggcacggcaaggaggtgaagacgaggccggatcccaaggtggagatccaggttaggtttgctgcttaatttaattaatttctccccatttgatcgcattttgtatttcttttttacagtttagttcagatcagtgttagcttagcttgcggagtggattaatggcgatcgatgtggtgggatgggatgcaggagaagggcgagatcttcttcttctatcgtcccaaggtcggcaaggacgaggcgcgcggccccgacgacgtgcagcggatgtacatcgtcctccgccccgaggccaccggcgacggcggcgaccgcgccgtcgaggacaagcaggcgccggactccggcaaggagggccacaagaatcagcagccgcagaacagcgacggcgatggcggcggcgaaggcggacacggcaaggaggtcgtctcggtgacagagagttgcagatttttcagagattttcaggttaaatttgatggatgccggtgttgttgcattgcaggaggtgaacgtcgaggagcaggcgctgctccggctgatcgtgatggggaagaagagcctgccggacccggcggcgaagcgcggccgcccgtactggggttacgtcgagctcgtcaccaccgacgtcgaacacatcaaagacgcgctcaaggaaggtacaaaacgcattcaaattttaatttcgttgttccaaatcgaaatgtgaacttcttatgtatgaatttgttgcgatcgattttgcagaggagtacagcacggcgacgcgcgggacgcggcggagggcggcggcgagggcgctgggggagggcgtgtaccgcatcctgaagcacgactccgggcgccgcgttcacacccacctcgtctacaagctcgagctccccttgccggcgcgtcgccgcgagcacgacgccgaagccgacgaggccggcgagccgcaggaggccatgaacgtggagccggaggcgtcctacctcatccagatcaagaaccccgagcagccgccaccctccggcggcgggggcgacggcgggttccgcgggctgcagagcaagcgcagggcggcgttcccggcgcacctgcaggggcggttcgggagcaaccaccgttacgcgccggccgacccgccggacctgctcaactacgaagggtgcgagttcctgctgatcgccgcgtccgacgacgtcgaggaggagctggggctcgagctggagaccgagaccgacgccgaggccgacctcgaaggtgatggcgccgccgccgccaagtgctcggacctggtgaagatgttcggcgaggtcgccgacgtgaagccgctgctgtccgggagttgggactagagacaatatgcacaagtgatcagctcgacagatagtgtcagtgtgcatagaatgtagaactagtttcagtgttcagtgggcttttggtgcaattagtagacgagtttaggagatgtttagagttctagttttagtgctgtactaatcttttggccggtgagtttggatggtgattttggagaacaatccgaaaatccaaaaaaaaggctgtaactatatttatgtcaagaacaagatcagtagcagcttctgagtatcttctgagtatctgtatctgtctggtttcgggctggtttgctttgttgtttgctttgaggcgtaaattggtcttagtgtttagtgtctatttgtatattatcttcataatatatgtagtgtttagagtgtctatttgtatattactaccttcatgatatatgacgtccttcataatatatggcgttattgacttttttttcaacgtttgatcattcgtattattaaaagaattatgtaattattatttataatatatgacgttattgacttttttttcaacatttgatcattcgttttattaaaagaattatataattattatttattttattgtgacttgattcatcatatgttctttaaaaaaattatgtaattattatttatgtaattattatttattttattgtgacttgattcaccatcaaatgttctttaagcatgacataaatattttcatatttacaagaaaaatttgaataaaacgaatggtcaaatatttttaacacattaatatgaagggagtagtaatttaaatagtgtttagtgcctatttggttttggtttgaagtcaattttggcatgcctaaaaaataggccatttcaatagttaacgtagactattttagtttcaattcaaatacaactttgtcttactaaaattagccatgtcaaaatttgtcaaaatttggtagtttcaatagtgtttagtgtctttggtttgaagccaaattttggcatgcttaagaaatatgccattttaaaagttaacttagactattttggcttcaattcaaatacaattgtcttactaaaattagctataaacttgtcagaatttagcattgataaaaattggtaaggccaatttatgtcacaaaccaaatcaaccctcttcaagtttcatgactcattgtttctctatgttctgtatgatgatgtagggcttgtttggtttgataccaatttattaccctactaaaatttttactaactttaatagtagcaagtgcatgtttgatttgttaccaaatttacccataatagttcaaattcaatactacctaatttgatagtgccaaaactaactttgatagtacaaaaattgattccaaactaaataagcccgtaacctctaaccatatactccctccatccattaaaaatatcaacatagtactggatatgacacatcctgaatatatgttcatgaatatattttgattcgttgtactagaagtaggttggctataggctcatttggtttagggtctattagattgctaaaaaatatgctctatcaatatattggtaatttgaatggtaattgtgtttgatttgttcattactaatacataatttagatttggcatcatctagaacattcttcactgtaatttcacattttgactatattttgttggtagcaaaccaaatatgatcaaatacaatcttactttaccaaagattaggtagtgccaaaacttacatatattttagcactaccagaaaaattgataggataacaatccaaataggcttttagtatcctaccaaaattttggtagtgccataggcaagttttggcactaccaaggttttggtagggtaacatagtacatatgaaagtttggattaatgccaataaggtgtcaaatttttgtgggtcaatttccatttggattggtaccaatgaagcgctaccaatttttttggtagtaatagctttgttactatttgttgcagaataagcacaaataagatgataagaaatatgcataattaggttcattttgctcatcatggtaattatatagcgtaaataattacaatggtagttgtgtggggttacttctaggcacttccggccgatgacaatatcaatttgaatttagccgttgctaccaatttaaatttaggcactaccattgattagatcacaatccaaactagccagtttactattccaataaccaaaatattggtatgtctcagttttggtagcaaatcaaaacggccctatttgtttatatgtttatgaatatattcagatccgctatactagaagtaggttggcttctttcgggacgaagtacgtgtctatatatcatcacagataaatagtcacgagccattgaaaataaaattagagaaaatagttatgagccatcaaaaaattgggaagtcggatactggtcgggtactccatgttagcgggtaaatgctgtgaaatataccgtgcacttcacgtggcttcctacataacaaaaacgaaaaaaaagaaagaaaataacgaatcaaaccaatccaatgcttcgtgtttgctgaattcttgtacagttaggataatgtatatgtcactcatgtcactagcatatatttgttttgaaagtgcaggacaattcaagtgatagttgtccgagcagccaaagagagaagacgatttctatcaacttaatatctatcattcacttatgctttcataataaaaacatcttattgacaaaataaatataaaaagctagtggcacaccaatttacgtgcgtgagacggaacatatttaataatatgtgtctgtattaataaatctcaaataaagtaatcacatattattttagttatatttgataatacgtagtaatatctaaaaaaatgtatataaattttttaagcacacgcacagtgtaagggatgaaatagaatacatgtttattttaacaaaatttgcatgttaattaggtttttccttcataatttagattttttttgtagtttttttaaaatctagtctaattttcataattataatccacgtaattaatatgttttaaattttcactcacaatatgttaaagaatgaaagaaaatacaatgataatatcagttgttttgaggacatattatgttagagttaaaagtattttatattaaggattagatgtatgaaaattcaaataatttgaggtaattaaaagatattcgatgtatgcttaaaaaatatatggtttttaaaattaaaccccaaataatcttttattagaatcaaatacttaaaagatattcgatgtatgctaaaaatatatagttttttaaattaagccctaaataatcttgtattagaatcatatattttaaacttcctataatattactcttgaaactctaacaacaatcctaatttcgttaaaactcttcgatcataagcctcaaagcttagattagaggtacattttgagatatcaaatattttacaaatcctaaccaatatacattatttttctttgtatgaaccaatgttaggtgatgatgaacacaccgcccataccttatcatcccacatcttatatatacccaacacttaataaataaaaaaattattacaagtctttctaaaaaggacttaaaaacagaaaaacaaatatcagcgattctttctgaaatctcagctcgttttttttataacacttcctatgcacgggttacatttcgtcatgtgtcactcatctgatgggcaacatgcaaagccaatcagatggcataaatgaggagaacgagatggttttttgtgtgaaagaaatacaatattgtatgattttgcatgagcggttgaggttcgaagctcaaaataaaactcttttttttttacaatataaaacacttcccacgatatcttcctcgaactcgacttcccttataatatcgccaaatcttgagatatcgagtccgacaaagagttgacttctggctactgtccaacttctatcggcatcttctatagctctgccgctgatatattctagccgatatagctttagtcgatgcaatcttctaactttagatcccaaaatcatgccgtcaataccactctgtgctttccccttactcaatggaatatgtcaaattttgctatgaacagtcactcaaatagttgtgaaaaaaattaaaaaaaaagatatattaacatgtgatatataactccacaaacatgcaagttcaaattcaatttctacatatcacaacgaaaaaaacaaattaaactacacctagttaacgtatattcacagtcaaatttgttttttcgttgcgacatgtagaatttgaatttgaatttacatgtttgtggagtgatatatcacatgctaatacatcttctcaatttttttcaaactttttcataagcatttgagtgacatgtaaacgacaagaagacgttccctcgatagtttaaaacccactctcgagaaactgaggggttgttaagttcccaaaaaacttttcctaaaaacatcacatcgaatctttggacacatgtatggagcattaaatatagataaaaaaaactaattgcacagtttgcatgtaaatcgcgagacgaatcttttgagcatattagtccatgattagccataagtgctacagtaacccatatgtgctaatgacggattaattaggctcaaaagattcgtctcgcgatttctaggcgagttatgaaattagttttcttattcgtgtccgaaaaccccttctgacatccggttaaacgtctgatgtgacacccaaaaattttcatttcactaagccctgaaaccaccttcctccgtcactctctcccagcatgacttcaaaatcaacaccctacatccctaccccataaccgtagagggcaaaccaacccaaaagcgcacacagcgtgaccacactggtcaaagagcaagaagatgcagactcatcatcactcactgctggcagaaggctacaacgagtgggagaagacatggaagcctcaccaaatactaaaagaacacccatactcaccactgagtgtgaaacaccgatactttattttcttgccgtacgtgtatcggatactccatcgatacggtatcgaaggagtatcggacacggacactaaacagtgaaaaaataaaaaataattaacgatactcgtaccatacttattggatacttctctgatacctagccctataaccacttgttcaatagcccattaaaaccccaatgctacactactaatatattttataagtttagtactgaccatatttattatttaaggttacaaggtgttaagcttgttacttgtttgtaagaggcaacaatgcatagaattttgttttgttaaggtaatcttattgttttaccttctctatattttagttttttaaaaatattttttatatactcaccgtatcgtcatgttgatgtttttcaaaattcccgtatcaccgtaccaatatcacgtatccatgcatcatgactggtaacacatgcaattaactacatcaagcactccgctctgagagctgtcctctcctttgagaacccccaaatagcatgaatcccaggataactctaacgataaaaaaattgactgaaacaaaataaaatttaccgccatatctgatcacaaaacgattacaaataacaacaatgacacaactcaaaagatcggacacatattcaaatggttccctctaaaaccattttattatattactgtgccatacagttttgaaaggaggcaccacgtttgctttggaggctaaaaattcccatattgatcggagaaaaagaaaagaatagtccaactagaaatacaatttaaaataactgaaattcataattaaaaataagcactcttgaaaaaagagtccatttaagaacctaatacgagatttattaacattcagaataaaaaataaaataaaatccgaaattagcaaaaaaaaaagaaagaagaattcgagcagaaatataatttaaaaataaataaaattcgaaattaaaattatgaaatattgaaagaagagtccatataaaaaacctaatacgagattaatttaaattcagaataaaaataaaaaatagaaaatagaaaataaaataaaagaagagtactgaaagttggaattaagtatagacaatattgaaataatagtacatataaaaacccaatacgagattaattaaaatttagaatgaaaaataaaataaaatccaaaattggacaaattaaaaagagagttcaggaaggaatacaattttgaaacaactgaaattaaaaataaaaaataaaaaataaaaatattaaaataacacaattcaatattagttaatattcaaaataaaaaataaaataaattcttaaattagaaaaataaaaataagatttcaactaggaatacaatttataaataactaaaattgatgataaaaaataaagactattgaaagaaaagaccatctaaaacacatgacgagattaattaagtaataagcatataaatgagtatagtggtggcggttgatgggacatgtaaaaattattaataaaacaccaaatataatcttaatgacgattaaaatgaatgatgatggataggtcgtaaagcaaccggttaaggcggttggcgggacttatagaaagtcgaaaaataaaccccaatgataattatatttaatttttaaaatctcaatgacaataaaaatgataggcaacgggcgggtcgtacagtagtacaatggcagagccggcaatagttgatgggacttctagaaagtaaaaaaatgaattccaacgatagttatgttcgattttacgaatcccaacaacaataaaaaataagcggcggatgggtatagtggcaacgtttaacgatatttctaaaaattataaaaaataaaatccaacgagtcaataaaccctaaaaactataaggtccaattttaaaaggttcgggcttctaaaaagttttaaaaaataaactccaatgataattatgtttgattttaaaatctcaatgacaataaagaagggaggcagcgggcgagccgtagaggagtacagcgacaaatccacgaacattttggcggaacttctataaagtagaaagaacctaaacgataattatattcgattttgaaaataccgaagatgcagcagactggccgtagaggagtataatgacaacgtttgacagaacttataaaaaaaatctaaatacgaaacccaacgagacaataaactctaaaaactataagatccaatttttaaaggttacaaggagaatgaataggaacagtggaagaccgagcaagcaaataaaaaaggatatgacagaagtaagggatagtaagtggtgtgactttttaaaaactactataaaattagaaacatggggattttaagatttggtcttttatagtcttataagacaacgaggtggttatttaataaagtttaagtaaaatcatataaaaaaataattgtgtataggcgttagccttgcgcgggccacccagcaagttgactatgataaaaacctttaatcgatccttcctagctcagttagagtaaagtagggcctcaaatcattgtggttggttcagtgatttgaggcccctggccagataactaaagcacccaatacatcatttcgctggtgagcttgtacatctcagacctgtgcttcagcatgcggagccctccaccattggcaccaccaccagcatcatcctcatcgtcatcgcagcgctccacctcgacggcggttaacacagcgaacagctcctcgccatcgcgatgatcctcatcggtgcggaagaacctggcaatgcagaacttgccggagcccaggttcacgaggtccgagctgacaagattgagggcgtctggcggtgtgaactccataggaaagctgcgaagcagcggcagctcgccgccatcaaggtccagagcggagagcaccaagctcctcttcctcctgtctctggtgctgtgtgagaggccaaaccaaaggccgtgctcatggcaatactcggcgagaccaacaaatggcagcgtccatcttgtggccactgtgctccacgcatggcgcaccgtgtcgaagcagtagatgccgccattgtcgtgcgtggataaccagatgtccgtgccaccgatcacagcgtaggagtcgacttcgaagtcggacagcggcggcggcgggagcgcgcagcagcgccaatcctcgttcaatccatcctcatagatgagcccatggaagcttccaccgtcgtcgacatcgaggatgtagaggtcgtcgccgacggtgacagaggtggcaggcaatgtcacctggtaggggagggcgggcatggtgcggacggcgtgctcgccggggtcgtagaggacggtgcggcagctctggtcggcggcgaccaccatgttgtggttgcctccaaggaggaagaactccatgttctggttcccggacaagctggaggagggagggtagaaggtcatggccgggcatggcaggctgccgtactccaccgcgtcggcggcggcggcggcggatggcaccggagatggacgtgggaggaagaagcggtccatgtctatgttccgcagcgtgtagttgctgcggcgtggggcgaactcctccagcaccagatgaacaaaccgacgaacactcatcgtcgatcgatcggatgaatcgatgatcgtccccaaaatgaagtaatcttactaaagattgattggattgattggattggattgctctggatcttcttctcccccaccacgaataactagggttttcacgaagccaaacgatctttctcgttgcaaagcgacttatccgattcggttacgcggagtggagatcatgcgggcgccctgatcatacgatctatctctatataaaccgagctgccgccttcacgcaacacacgcgaaatcaatctagggtttgcctcctactctgtgctgcacctgatcaagcgatctatctctatataaaccgagccgccgccttcacgcaacacacgcaaaatcaatctagggtttgcctcctactctgtgctgcgccatcgctcgtagactactccatcccactcgccggtgtgcaccggcgatcgggagagtagatctccggaacaatctacggtttgcctcctactctgtgctgcgccatcgctcatagactactccatcccgctcgccggtgtgcaccggcgatcgggagagcagatctccggaacctctgccttcgacgtcatgcaccgggagaaggcggaaataaggtttttgggaagcgcttcgcgcgactgctccctgttcgtccgcgatggctcgccttcctcttcgctcgcgtgctgcgcaccttcgtcgacgcctgcaaccgcgagtagtccctgccgagcaaccggtctttccgccacctcggtacgtgttcgacatgttgcgcatatttgatctgttcatattttactgtttagtttacatatgtagacctaatgatgcgttcatgctagtttatatctgcaatgtcatgatttatttatggaataaattaaatcattatgtgcttataatttcaacataagcgaatcggatagtcaccggcggcggacagatgatgggaagggaatggcggaggaagatggagtggagagaggggaggaggagttggccaccgacgaggtccactctggtggcggcggagaagaggggtgagtgcgggggcgtccgggggacgcggcgggtgggaagggaggaaggcgagggcgtgtgatctggacgtgaataatatttaaagctatgtgtgaactgtagataattataactagaggactgctacaccacggactcccgtcctaacgggataacttaatgaggattattgtttgaccaatcaaccacttctgtcaatctatccacttcacgtaattccatacaagggtcaaagcgtcagtgtatgttcacataatcacgtgagagtctacaggcttatggttgtctttcagtctttcactagagacacaacacactaggtactcgatacttaggtggtaccaggtaccggataccccatatatcataatatctagtactgggtatggtacctttaggtatcaggctggtctaggtaccaggtatatgatacctaggtacccaacgtactcagatggtaccaggtaccgaataccccatgtaccatgatatcttagtactaggtatggtacctttagatatcaggctggtctaggtaccaggtatctgataccccaggtactcgatgccctataccagatctggtacctatgggattcatgccgatctaggtaccaggtaccttgctaccccaggtatcaggctggtctagataccagatatctgataccctaggtacccaatgcccagtaccaaatatggcacctatgggattcatgccgatctaggtaccaggtaccttgctaccccaggtatcaggctggtttaggtaccaggtatatgataccccaggtacccgatgcccagtaccagatctggtacctatgggattcatgccgatctaggtaccaggtaccttgctaccctaggtatcaggcctgatacctatgatatcagtcgaaacaatctgggtaccagttacatgatacctatgtattagaaactcgatacctaagcattaggtatcttgtgggtatcaagcatgtttcatggatattaggccctcatgccgatgggagctatgagaaaaagggaaaagagacgaggcaagcacaaaaataagatggctatcttccttggaggtggaagaacactattccttcttgttgccatccttgattcggatcgccgctgctacatcctcgacacgcatgtgaccatgatggttatggacatcgcctgtgacagtaggacggacacctcaatctctcctcctagctcgaactcattgaagctcttcctaagcacctagtacacgagagttcccatgaccaccatcaacgatgtgatgttccgcacaacgagagctaacaccgctctggtcttgtcgcagggcttgcagtgagtacttgcccagccacattaattaggaatgaagagaggagttagagagggagagaggcgtagaggaggagaggcgaaggaggaggacgaccaagcaaagctccgggagagagaggtagaaagggaacagataagattggatatcgtttcacttctcccgttcctacggcattccgttggctagtttttctgttataactatttttagacgacatacggtgctcagtgaaaatatacggtgcttctctaaacttgctttccgatgattaataatcagctgtaatcaaagctgttagcacccaatggagtacaatatattgctgatgagcttatacatcagagacctgtgcatcgccgtcgtcgcagagctccacctcgacggcggtgaacaccacgaacagctccgggccatcacggtgttcgtcgtcggtctccaagaacctggcgatgcaggaacctgccgacgaggtctgagccgacgggattgagcgcgccgggcagcgtgtaatcccgaggaagaaggctgcgaccacaccggcggcttgccggcgtcaaggtccgtggcagagagaggaccatgccactgccatcactagccggtgagaggccgtgctccgggacgtactcggcgaggccgccgatcgaacggcagcgtccagtcgtcggcggcgcgccgtgtcgaagcggtaggtgccgcctccgccgccgaccaggagtcgggttggaagggaggcggcgggagagcacggtagcgctagtcctcgccgccgtggtcatcgtaggcgtagatgagcccatggaagcaaccaccggcgaccggcgaatccgaggcgttgaggcaggtcgggaaggcagaatccgaatccgaatgaggacggtgtgctcgccggtgtcgacggcgcggcgagtctggtcgactcatcgccgatcgattgaccatttgacctccaagattgtttatctggcatcctggccccgcctgccatagactcatcggtctctggccccacctgtcatagactcatccgcttctctctgctcgttagttgccttcgtcctcctgccgcctcgggtgttcttccttcctccatcgccatggcggcggcggcggcttcccaccgcgtgttcgtctacgggacgctaatggcggaggaggtggtgcgcgtcctcatcggccgctcgccgtcctcctccccggccgtcctcccaaaccagtccgtccacgagacatctgtttcttcttcttcttcttgccaagaatcccctcctctctgctgcgaaattctgatcggccaccgtctcctgcagccagaggttcagcatcaaggggcgcgtttacccggcgattcttcccgtcgacggcaaggaggtctcagggaaggtaagcccctcttgcttcctctctcggttaggcaatcaaagattcaagaaagctgaagagtcaagtgaagagaaaaatcacaagtgcttgttgctaaatcagcatgtggagaaaattaaggccagttaatctgtactcttcttttatgtatgttgtgcaggttttcaagggcatcactgacagggagctcaatgtgctggatatatttgaagatgaggagtatgtcaagagaaccgttgagatatcactaactgtaagcctatctctactatgtacttagcaaattccgattgtttagattgcctgaaattgctgcttcagcagtctgtcatgctgtactgaaattctgaatgttcagcaagattggaccctgtgtcttgaaggagaaatgttttgattagcttcttcttttcatcatatggcttcagtaagatgggatggtttggattttcaggacacatcggagaaattgcttgcttatgcatacatttggggcaatcaggatgatcctgacctctatggtgaatgggactttgaggtgaggatgtttcctttttttaaaaaaaaaaaaaacttccatatgccataacagtgtataacgtcctaacactatgctatcatggttcttaacacaatgatactcaattcacgtatttgcgaaaccatgttatcataatcatccaatgcaacaacctggcagccaacaccatgagagctgcaagctcttgcagaaatagtatatgcatccgtagaaagccatttctagttctactgtcagttcagcaatccttgttcctctgagtgaccaagatcactaacttcaatcagtcatcaatcatttaacatagacgtgaatcagttggtcaaattcgaacctgaatagaaatggcatgtcagatcttttggttaattatagagcacacactcaagaactggtagacttatactccatggtcaattagctgtgtagaatgtttactgacttttgagccctgctcattcattgctcttctctcttctgctgtcaacttctttgaatcttctgttgtcgaattgtgatgtcctcggtacctttaattcctgtgcaatgtgttatctgtaggaatggaaaagggtgcacttggaggattatgtcaagatgacacaagagttcatggaggaactggaacagctcgaaccaaagaccgagacctgaagctcaacactcattcgtccagaaggattcactcaacaatgaattgtatgtgcattgtcaaatggttctcctcttgtttgtaaataagatgtttacaccattaattgatagacaacagttacagaattcgcagtggtttcaattttagtgcttataagcttgagtgcaaatacatataatttctgtgcttttgaatcagtccatattttacatgtgatgatgtgaaacaaactatcttcaattcagaaattgattgattggcagagaagatgacaggataaagaaggaaaggtgcagaatatttgctatagtggtttctaatctgggtctgatcttaatagaggcttgaacaaccccaagaacagttagggcaaatgttttctctaaaatacactatcttaaatttcgcctaaaccctgtctcaactcgttaacagctctaggtaagttccattcttatctctaactttttgcaaatgcaaaaactacacaatatatcaaaagaggaaaagaaatattctgaggagcatttgccctcccagctataagctgacactctacactgaattcggcgcatagccttttaggccacggatttgatgatagttatgctgggtttttgtagccattgcatctcttctgatcccattctgaattcataatggacgcaaaataagacagggatgtcaaatatttcatatgtgaatgaacctctaagtcaggtcattcgaattgatcatacgggccgatggaagggttcccggggttctggtcacagcgaggcctccaaccattcaccccatctgagctgctgcaagcctggttggggaggacattgctccccagatcaccatccaagctcatctgttgcacttcttgaggtgatagaatcctaatgcatcttacacagttcacaaactccctacataatccgcaacagctcatattagaataactaaccagtaaaatctttcatcgaatagttcacttgcacatcttgtacacgcattgtttttcagtttatgaataaacatatttttctgtcatattatcatgctggattaaccatatttcactctggtaaacatatctttagctgtcaattttagcaatctttattatcttggggcctattttagagcaggaaattaaaggttcacataaggagaaagatagatatacttactcccatgggtcatcaccaagaagcaggatgtcatcctcgtgatccttgtagaccagtttccagcctattctctgtcgatcttcaagttgaccctctataccaaacatgcgagccaaagcatgcttcaactcttcatatccagagtacctgccgatgtcaatagaccggcctacagctcctcgtttgtacacctataattcttagattaggcttactagcatacgagccacaaaaacacacatcttgaatgctacaccatcataacctaagctaaggaaaagccaataccttggtgaatgtccgcattctctgcagcagaggggcagcgggccaggaatttttgttcaagaaggcaccatcattgatcgcagaatcaatggaattaaaagccatatccgactgaccaaatgactgggaaaccatggaggttgatatttcttgcagagcatccttttgcatcgggtagttgttttcaacatcagttgatatgtgattctgatacttgacagaatcaagtgcatttatcagcaagtcctctgtttctattgggaatcctaacaggttatcattgttgatcccaaacaagccactgttacttggatccacaccttccatttctacatcaggaagtgcatctttgaacatctggtgttgattgaagttagaagaggggaaaccttgatgcacaagtccatctgttcgggaaggacataatgaagttgctgatgaagatgtttccaagttgtctgtttgcaatgcatggtttatacaattttgtgggccaggagcaacatttggtaattttgagttgacaacactttgcttcacattattattcggctttggcaattccttggtcattagtggagttgctgttacagcgtcaatggaggttgggatcaacattggagcagtggacggtggcagcctttctgtgttgatgcaatgtctgtttttggttgattgtgtaaagtggtttccattagctgtggatggagatgttgaacaagagggcatttcctctgtaactacagattgtgtagcacccgaaatgatcatagcacctccagttttggggatcacattggttgatgaaattggttgaaaagcaactcctgacacatctgcaagtgagacttgtttctgtaaaagcttctgctgttgctcttgctggaccgtgggtagcaatggtgttgcttgcaatgaaggcttgatttcttgttggggcatcatttgttgctgagcaagtgaatgtgaatttgacaactgcttttgcatgtccgtgattaacttttgctgttcttggatcagaggtggctgtgagagtgttgatgtggattgtgacatcagtgattgctgctgcagtttctgtaatatctgcaactgaagctcctcatcaaacaacttagactgctgacttgccagatttaccaactgtccaagggacttatttagctgctgctgattctgttgttgctgctgctgctgctgctgtaactgttgtttttgctgaagtaaaagctgctgttgcagctgtaaattttgatccttctgttgatgagacaaaagcagccgctggccattaatcctttgcgggttttgagttggagatggcttctgctgttgcatctgattctgaacaatcacctgagcctggacgagattagattgagcttggctcaggggaatcacttgtatggagttctgctgtctctgatggttgacagcatcttgtttctgatcttgaggattgatgatagcaccaagctgattcaacggaattgccgccttggacagatcgttcatggtttgcatttgctgagggagcttgggagaattaaactgtatgcagttctgttgaaggagattgttctggacatatagttgccttgcaagttcatcagcagcaaggttttgcatggcagggttacctagagcttgcaggtactcagactgcgcagcggtgttagccaatgatgagctctgctgcctgttcatgttcatccactgaaccaaacttagaccaggtgctgtactgttctggttttgagtatcctttatgcatacctcctcaccaagccaaggcattgccctcttgaaaaggttttccatctctgactcgtcatctgttaattcagataaaagaatatgaaatatactaccataaaaaaaacatatgctaatgcgataatgtaattagcctatagcaatcctggtttcgaaatttatacacttgttatcctgttcagtctactataaccatacacaataacccattaagtaattccgcatcgatgtctaatgtttaacaaatatgcagaccaattgtttccagcacacatagaataagtaaaaaatatgagcagagaagtaccaaactagtatatgcgcatactgtttaaattaaggaaaggtatttgcaaccaaatgttcagaggccatttgaaggaaatcagtgttgagtattcttgttgaacatactaatatcagtcatacctaattgcctggggcgcttcacaccaaaaaaaggttggggacatagaaaaaagggagctgcaaccggttcaatctcccagattgaaactctgttcctcctttcaccagctgcagactcatcccagccaacctatagaaatcaaatcagcgaaatggaagaaaaatgaagggtggaaaaagattaacacaacttgaaaggtattcaggaattcaacctgtaaattgcgccattgggagtttttccatctcacaggatctaggtcacttattccagttattgtacccatgtacctgaaaaggtagatatttacctatacggacaacatagccatgatttttttttctccatgttttaaaaagaaagcaaaatgcatgaatctcattatgtttcaaaagtatgtgttttacggataataaatgccagcgtaccttcttgttcctaattcctcggtttcaaacatcatgcgaaaccgcattcctaaagatatctgattactatacagtgccttctggtattttgcaaatgggataacaaattcagtaggactggccctgaaagttcatacacgtcaaaacacaatactcagagctattcagttttgtctatacaacttagctattgaatgtacagtaaacaatacagacaggagtataaagtcagcacgcaaacctagggttataaaatatggtaaaagggctactgttggcagcagcatgggcagccgcagcaaggactcctatgtgcatactgtcgcttgaaagtactgaagatgatatattagtcggttgtctgttagcacgcctgattcctagtagaagttgatgcttttcatccctgaaaataacatgacaataaaaaaaaaagggggcatttacatcttggattttgctgtttattctgtacctaaactaggagaagcttttattagatggaactaaggaaagaagcatggagttcacctcacaacaataacagaatcaccagcaaataacctcttgccactcacgaaaaggctccaaccagtagtaagtaaatgtctttttggttgacctgataacacaaagcacagaaataattaactgtctccaaactttacatatacgcatcaaagacattcaatagaagtatagaactagggacctctgttaacttttataaaccataagacagacattatcgttcactattaattagcttaataatagaaaactgatgcagaagtggtacccatgttggtattattataggaaaactatagatcaaattcaatttccgaaactgcaaaggcatactctgccttaccaaggtcaatggaggggctatccagaacaaaagtagatactagatgcatggagaatctcatttatcctgccattttacaaagaatgttatactgaatgttaaattttccacacctcgatatatatgacgaaatgtccacacattgtcatgtatatctctagcttgcagttcttgagctggaggttgcatagagaagtcctacagtgcagagtggcaaaattacaatggtgctaagaacagatcttttgttgcagaaaatcagaagatatgaagcctacataccaggggagggaatatcttctctgcggcacggcgaggcacagagaatcctccatgtgtacttgtatcacttgcggtgagtgtcttacagaagaattccatttgtggccttgcttgttttagtgcaagctctgatatttgcaacgcctcttttccatactgataaaagcaattgatgagtgcatttgaacagactaggaacttttgcggaaaccacaattttttgtttgctcactgtattcactggttgaagagtcatctgtgcataaacttcatcagtatctgggtctgcctgataggtaaagataatgattttagtattgctgattgctagttcttaaagcaaagagaaaatggaaggcaagtagctttaggtacatgcaaattgacaccgtgaagaagacatatcaacttggagggaagatttgggtagcttggaacatgtgcatccacatccttttgcatagaagctgcaacctgaaacaaaaagcttagattaagtagatattctgctgtttccaatagcatggagaaagcatttcttaatatctgaaacaatgaaaaatgcagtcagctgaaccaagtagccagtatatgtggatcaacatccacttttttcaaactgaaaaaaaaggttttgtgctcaagaacatggaagtggaaaaagaaaagtactactgcactactctgtaaactagcactcgataaccatctcataaaaatttaagaaagtacaacctttcaaacatactatgttacttttgtacacctgtcaacaaaatttcaataaaaaaatgaagtttcgtagtgtccagtccagaaagtgcggttcatgagtgaactttttttagataaactcgcataagtacaattaccatcatgtgcagcgcaaccaaatatcattcatgaaaaaggaccttttttctcatctttctaaaaagaaatgcacgaataattgcaggattagtcctcccaagactgtctattgacctaataattaattatttattttttcaatcagagcaccataccttaccatttgacaaaatttctcaaaacaagtaggagtatttatttattacaatcggttggactagaaatgatccatctcagggtcatggatgcaagaaatccaaatcccataagatgcttcatggagaccaaaccacattaacatcgaaacagtactcaccatactagtagggcaacagaaaagggaagccagtaggcccaatgctcccaaccactttggtaatgaacaagtacagttattagtagctacatacaagcagagatgtctctgctagcaagtaaaatcctcacatacattagcagtgaacaatgcatcatgtgagaaatactcttcaactcttttgttataaaaaaattatcttccataggagatcaaatatccaaagccaaaagtttatttggggtgtaagtaaaacatttgctctgagaaggatcgttgcactgtatcaatcactgcaacagtacatacagaaagaaataaagaaaagttcttttctgtaattaaccaaaagaaaaaaaattcccattgaacaacccacagaaatctgagagtttcacctcaaaacgcacaaaaaagaccacaaattttcaaccttgccatgagcagcagcatcagattaacattatactagaggagaggagagagcatccaaaatacagcagagattaaacagcaagaactgaagaagtcttcgatcaaactaggtcgatgatggaagaagaggagagagagagagagagagatgatgatgacctgctcgctgtggccttgcgggaagtagacgacgaggctgcccaccggcggcagcgacacgagcgggccggcgcacgcgtgccacagctccgagttgatcgccgccgccttccgctcccctgcaccgccgcagccgccgcgtcagccaccgccaccagacgagcgaggagaagagaaaaaaaaaagcagtataccttcgcatgcggccacggcggcggtggcggaggaggaggccgccgccgccgcggtcaccgcggagctcgccggcgtctgctgctgcttcatgctcgccatggcagttcacttcagagtcctcctcctcctcctcctccacgcatggcacgaccgccgcgccggcgccgcggggttcggcgctagctcttgccagatgaaccacgcacacaagctcggctactccggcggcggcggcggcggcggcgaggcgagcagcagcagcacgaagagcgaggtgcgctctgcggcgtctcgggagtgggaaagcaaaaaaacgaaacgcacgcggcgcggcggctctcgttctgctgctgctgctgctgctgctctggcctctggttgctcagctagcaaagcagctggtgtttttcaagtgcgtcaaaaaaaaatatcagttcttctattggagaaaaaaaaatactagtagaatattgttttttttaacagtggcagggtttagttcccttcaaacttcaaaaaattccgtcacattaaatgtttgacacatatatggagcattaaatatggacgaaaaaaaatcaattgcacagtttacatgtaaattgggagacgaatcttttgagcctaattacgccatgatttgataatgtgatgctacagtaaacatttgctaatgacaaattaattaggcttaataaatttgtctcgcagtttacaggtggaatctgtaacttgttttgttattagtctacatttaatacttcaaatgtgtgtccatatatttaaaaagaattggcacacgaactaaacatacggctagtgtaaaaaaaattgtttccttgcgaagagtaataacttttgtgtgggcatgcaaatatgcaatcggccgtttgggaaaatgtcgggaagatatacgttggtcctccgtgctctccctcttatcataaaaccatgaatatataggtggaaatagtatgacagtcttgagttagcatatatatttggtagagtttcaaatctctgtgtttggcagagttttaatgtctgaaatagcttagttgtggagctgacaaaaagcaatctcacccttcttatgtttttccaatagtggatccttctaaattgctcttaaaaattaagaatctagtattatttaattcgggcgactgtatactaaacagatatccgaaactgataatagtattaagtatctagggaagtccatcatactacaactactccctccgttccaaaatataagtattttttatcctgacatatggtctccgagatgctactttgatcaacaatatctataaaagtaagatattttaaataaaaaagttgcatattagaatagtttgttcaataataaatctagtaacatcaattttacatgattgattttttttccctattaatggttaaaataaaaaatgtttgacttgttacttttctaaaaatgtttatattttagaacggaggaattactatgttactatctccatttgaaaaagaatcaatttctaaggataaatttggatctagaatcatacctaaagttgattctttgaatgaggatgtaccactcggcaaagactttttttttccgaaagaccctaggcaaagactcaacaagacgagtggacgatgttagtcacgatcgagtagctaggatatatggtacgattagttgggatgttcaaggaaatcccgcgatttgtccagctaattataaatcgatcctggagcatgtcttctgtaagctagcttgttcgatcgacgtcctcatcatcaaacgccatttgtgtgttttgtactactagtacgtgtgtgttgcgtccacttgacacattggtgataatttgctaatcattttgtcagctctgcatcgtggaaacacaatgctcactactagtagtatactagcatgtagcgtgctcgtccgttcatcctagtattttcataaaaataaacgtttcagagcaggtacaatagtaggctataaaccagctgtaaatataatttaagaagataaataagaagagaaaagagcagcgggctatatatttatagccagctgtagcacagatttcaagacgcagtgtgtgtatgacaggtgggaccaggtattaatagtgtagtatgtaactattgtatggataagctattagattggttatagataaattaaagctagtagttggcttggataagctattagattggttatagataaattaaagctagtagttggctatactattaaacttgctcttagagtatatccatacaaacatgccaaacttaccgtcttggcactaacatatttatatggtctgctcatggtgtgttttgtagtacacgctccttaatttctactccctcgtctttcgcacgtacgttttccgaacatctaagcattgtatattaaaaaaggttatatagaaattatttttagaaaaacatattaaaccggccatttttcaaggtttttatagctaatacttagttgatcgtgtgctaatgagtcaccctgtttgcatgcaccctcaatagcctcatggcatgatcataccaatgcacagaatttaaacgatttttgcgagagttttagccatttagtcctataagaaacattctaaaattctgttgtttcaaaggagaaatcagttgcttaacctttaaaaaaagagcgggtacaataagctgatactataagtataaatgaggcgtacaagttatcacatcatacttgtatttatgtggaggagagagaagaaaaacgagctctaaatttatagtcaaccgtacagcacaaacttcaatatactgtgtgagagagataagtgtgttagatattaatgatacaatatgtctatatctatatattacttagtattccatgagtaaactattaggttggtcatatataatgccttaattttttaagctagtagttattatattattaaacttgttctatgattttttttatagtatgttaagagggttgggattgtgattagcaaaatgagtgcagggttacgataaaatattaaaatgagtgagagggagatgataatggaaggcagaagaaatcgactaacctctaatatccaaaagagaatcatgttgataggtgatttttttttctcttaatccattatccaaactggctcaaacaccacctaagatggtatttgaatcttctgaagatggagatgaagatgaatattaagttttttacgtaaaacgaggtggtattaacgtatgattgattgagttttaattattacaaattttaaaaatggattaatattatattttagagcatctttcatatagaaagttttcgtacgaaacacaccgtttagaagtttaaaaaacgtgacacggaaattttaatctttatctaattctggttggagaaaaaaactgggcctcaagactcatgtccaagcccaaccctgacccatctgccttacgacagtgtacggcttcgactgcgaggggtcgatccgacatgggcagggagggagggcagcaaggggttgcgatgcgtcgtcgtgctcgtcgttgccgacgcccgcggcacggcgacacgtccggcggtcgccgtgcgtcgtgccggccggcgaggggacctttttattactatatcccctttccagcatggactactactaccactctttttcactcctctagctgctgctctgctcagaggctcgtgagctattcgtagctaggctttcgccagccggcggcgaggagttggatgacactgacgcacgtactgtcgctgcacagcggttagagcaagtttaagagcacccgcaatggtaaagtaagttgctatctataaaacatgtacatctcagcaatagactcaattaatagtaaaccaccttaatagtatgtctacattggtatctataattctctcatgcattgcctcgtttttctctatagactatctctaagttagtagatagctttgctctctctcttcatttaataccttccaagtagaaaaatatgctgacatggatctcttgtagagagcctatagataaccattgtgggtgccctaatagtatagctaattattaattccaatttatctatagccaatctaatagtttattcatataatagttatatactacactattaatatatggtcccatctgttatacacactgcatcttggagtccatgctatagctggctacaaatctgtagcccgctactcttctctctccttattatctacttaaaatatgtttataagccaggcttatagcttacgcaattgtacctgttcttaacggtggccggcgcggtgacgcatgcagtactagtgcagagaggtggtcggattccgaggagctctcctgttctgttattgtcctttcaaacttctaaaaattttatggaacattaaatatagataaatgttgtatttagattgatccaaagtttaaaatttggttgaaattggagacgatgtgactgaaaagttgtgtgtatgaaaggtttgatggaatggaaagttggaagtctagaaaaaaaaactttggaactaaacacacccaaaataactaattatgagacaaatcttttaagctaaattacgctatgatttaacaatatgatgctacagtaaacatttgttaatgatggaataattagacttaataaatttgtctcacaatttacagacggaatttgtaatttattttattattagtctatatttaatactatatttttatatattgtccatatacttgaaaatattttggtcagacaactaaaccgtactacatcggttgtgtagttggcacgcttcttcatcagtgtggcctcggtgcccgcgccgccgcgtgcgccgctctttcatcggtgcccgagctcaacacacacacacacacacacacacacagccctgccctgccttctctcatgcgagacccctccaccgaatgtagtttcggcttggctagctccagagaaaaccatagaaaaaaattccattttggttatttgagacacaggattataaaaacgtaaaagtagaataaaaaatacatgaatgaatataagtagaaagtcatgtgtagaatagagtatcgaaaaatggtcgttgtttcaaaataaatcaacttttgtgttgattgagagatacgtaaaacgagatgagccattaacgtatgattaattaagtattaactatttttaaacttcaaaaatggattaatatgattttttaaagcaactttcctatagaatttttttttaaaaaaacacaccgtttaatacttcggaaagcgtgcgtgtggaatacgaaacaaactcaaagaacacaccgttttatcatatcgtaggttgtttaattttggactgaaggagtatgcattagatggagcatatgaaaaacataatgaagggccccctttaaaatgtaagattgtcaaaaacacgagaatagaaaaaacatagaaatatgatgttatgtccgttggatttctaagagatttgaaaacacaagaaagtttcaaaactaccgtttgatagccatacaggaaaaacgtaggaattcaagacacggaaagaagaaaatgtgaggtaagacctcaatgatatttcttgaattttctcaaaacaatggtacttccttcattttattctctccatatcaatgaggggtacagtgatattttaatcacctacctaatttgtttttaactagctataactatgtcttgttccatagtaagattaatacgacctcatacctcatactctttatttcattctatgtggtctccctagtttcatgtgtttctttctatacaagttatccaaaggcataattttctaaattcttatgttttgggttcctataaggttctatagcttacaacatttattcatgtatttttcttgttcccgcatttcaaaggaggccatagactcgtgaagtgagcgtaactcaactggttaggttccttgtggtggaaccacccggttttaaatcctaaatttgatacgagtgctcgcatttacggctaattattatttcagtggtagacgatgtacccgtgaatagcaaggcgccagtagtgacttcgtcaatctcaagatatacccgtccagttcggaggtgctcataggggtagggtcaacagcgaagctagtggtgactttgtcaatctctagatatgccggttcagtcttccggaagtgcttataggggtagggctaacagcgagacgctagtggtgacttcgtcaatctctagatatgccggtccagttttccggaggtgctcgtagagtgtgcgtatgtacgtttatagggatgagtgtacgtgtgttgtgagcgcctgcgtttatacatgtttctaagaaaagaggccatagactcaaagcccgaattaaactggctccaactaatttagaaaaatcggtttcactttagtaaacatgattaattattagagtggtagattagcagtaattgtactaccatacacgtcacatgagtacatgatggtgctccgtacttgtatatgtaagcacccatacttctacttgaaacctcgacagcgacaagtgccaagcactagctagagaaccgaagaaaagacatggcaaggtcaaatggccacgtagcaactcatcaccaaaaagatagtactactacaaattatttttcttttttttaaaaaaaaactcaacagcaagaagccaagatacccggtacttgtagtggtacaacatgtgtaggcaggtcaggtcaggtcatgtggtcaaccagccaatggaaagcaaccgagagatgccttccatggattaatgtgcatggtagtagcaaatggtggccagcatatcgttcgatttttcagacacgggacaaaaatcgtagggactcaatcttttcgctttatacttatccgttaaaatttaaattttcaatcttaatttaaagctgattttaatttttttttattttttagcattttacttttagatttctagtaacacgtatataaaagttttatttaccaattacttctcgtttgtgaatatacgtttggcttattccacgaataaaccaaacaatgagaccggtactcgattcaccttttaaacctctcccttgtcttatgaagtataatgaactaaaaggacaagtaatttactcctttcatcttaaaaatacaaaatttgaaaataaatttggacagtgatagaaaagttagaagtttgaagaaaaagtttggaagtaaacaaaggctaattcacctccaggtggagttaccgtccgtactgaaaacattcatacggcagacatattgacacaagataatttattataggagtagaaaaaggaaaaaggaaagctgtcctgaatggggagcacacatcgatggatttgccttgtctcctggcagtgaggcaaagcttattctctggtctcctcttacatggatcacgcccaagacagctttgtacgacctaacatcacctggtcagctctaaattccatctctctctcgtcacgggccgcaccaccatcagcaaccaccaccatcagcaaagattcacgatgctgtaattatgtattaactgtaactatgaggttattataggatatacaccctccgtcccaaaataaacacagctataagctttcgtacccaactttaatcgttcgtcttatttaatttttttttgaaaaagctaaaaaacataaatcacgcataaagtactatttatgttttataatctaataacactaaaaatactaatcattaaaaaatttaaataagacggatgatcaaagtttggtacgaaaactcatggttatgtttattttgggatggagggagtaattcacaaaatagtaaacggaattgcttatgaagtgatcttacttcatcttagttttattagcgtagatgtttataaaaggtctactactcctatgtgttttaaaagttctttttttatgaaattaaggagagatgtggaattaagtgagtgatggttgtaatttgattgagatgagaaaataagtgggcaagtttgtttaggataaattttgaatgttagcatactcttatactaatgcgaacccgctagggtttgtggcccgatctttcgatgagaggtaggggataactcgattggatgaagacgacgttcacggcccgactacaaccgtccaaagacgctgcgccttagcaaccgatacaccatctccaatggtcgccgcgaacttgtggtgcgcgtcaacccggccacgagagcactcgtcctgcaagcaatcgaagaacaagcaagaacaagtagaacaagcactgaaattgctagataaagatgaaagtttcactatcaaaacacaatatggtggggttccgattacaggcagacgggcggtttagccaacacgcgcgctgcgagccggtagcaagtagctatctctatcatcaaaacccgagaaaccctgaaggggtacctagctatttaaggatgtgggaggatgaccaatggtgccgtagggtcgttctccaccaggttggggcgcaccccacatgggccccacttgggccggggtcccaggcgaagttacaagcctataggcccattacaggtgacgcagcaccttgtttctgcgattgccgtcgactgagatggaatctgggaacaagactggatccgttgaaaagaggacttggagagctttccatcaagtactcatagacccaaaacggagctcgtatgaaaatttggcggccgtttgaagtcagcaatgtagcaggtggccgaatcgaattccagcttatggaggacttgatcttgatgtcttcttgttgatccatgatgtgagcaatggttgtatccatagtagccatgttcacatcattctccccttcttcactgaaaaccgtcctcggtttttccatatggtgctcttcacacagtccattcaaaataacctgtttcatcaaatcaaaacaaggcaaactcgaaataattttgttagcaataacatttctctctagcttgcatgttttatccacatgtataggagattctaaatctgaacatatgtaaactctatgcaccaaatatagtcctctatcatcagattcgccaaatatatgaaaaatagcactagttggacaaggcaaatcaaacttagcaaataatttcttcttcaaattattgagctcacaaaaatcatcaaactgaacatagcccaaaatatttaaagaagatagcaattcacgttcctgtacttcattagcaatgtgaacaacatgcttaaaattggcacacaaagaaacactagaaatagcatgttcattcactagttgtgttagggatataagtgaagcattatcacacaactcttctttatcacaaggaatagtaagtaaatcaacttgtgacaaaggcaaatcagaagtagtttccaccaaaatttgttctagattagcatggatagtggacaaatgtgactcattagaagcacactcaccttgagtaatatcagcaccatttaatttaccttttatgccctcttcagataatgtaggtgcatcagtcttctcttcttccttcgtgagtgatggagatgacatctcgagcatattgctcttctcctcatggtgaatgttctgagctccctgcaaaatgtcagtaataggaggcacaagcatagattgtttctcccttgggtttattaaaatattgctctcaacactgcaagcaagcatgaacaagttgcctatatgattatatgtcacgttaataagcccagcctgaatattggaattaagccctctgaaaaatctagtcattgtgttctcattagattcttgtaaatcactataagtaatacaaattttaaaatcatgaaagtactccctaacagttttgtcaccttgttttagatgttcaaatttctcaaggaaagcacgtctatagtatgaaaacacaaatatttttctcatcagtattttgcattcatcccaagtttcaagcttatttcccacagtatgccaccaaaaagatgcagaaccggtacacttattactagcagccttaatcatttgagcattagaaaaatcatactcatcaaattgtttttctactgctagctcccaattaacataagcggcggaatcatacttaccatcaaaaccaggcaatttagattctacccttgcaagatcactatcatgtacctcatatgtgatgcgtgaagaagtcgctatatctcgttgatggtgaagatgttgacgttgagcatgaccatctcgtttccccatgcgcaatcctgccatggttagtagcaaataagaaacatacacaaaaatatgcgcgttcctattaactactaggtagtggcagctcaaaaatcacacacactcaagcttttaaccaagctcttacaagatcttaccaatgcaagcggaatggtgacatacaccgactcaaccaagcaccccaatggaggttggatgtatcgatgccttggcaaatacttgctgtacggctgcaatcaaatctgtggagctctaggtaggcttaaatatgtagcaaaggaatagcaaatgctcaaatcagataatgcaaagttgaataattgttcaaagtcaagtaccgtgctggtcctaggctagaacgtactagagacgcgagcctagacacaaacgataccacaagatagcactaggaacaactcatgcacaactctgatatatgaagttcagctcaaacataacagtattttctcttttctttctttcttctttcttcttttcttttttttctttccttttcttttctgtttttttggtgcatcttttttttcttttcttttttttatgcacctttctgccttttttttctctcacttttttcttgattttttttaacaaaaactgactcaaggaccttaatgtaaggttacagggactcaaacgtaaatataaaatttatagggactcaaatgtaaaagttcaaaccaaaattaaaaattatacaaaaatggaatgctgaatttatactgattctgtttttctgaacggatcttgaaacggacaccaaacaaaaattcaccaaggtgtaagggatggcacggtgtagattgaaccgaaaggagaggggagtcggactcaaggggggaatgccgcatggaaggtggtgggactcggtgagaatttctgaaagaaggaaacctattccttttctgcgtggcccccaaatagaaacgaaagcaatctaatctagtctaatcttctccttccatcttcctcatgcgcatcttctccttccttcttcctcacgcgcacatgcacggcaaaaacaaacacacacaaggatcggcaaactctagatgcaacacaataactccaaaactaaccgacagaaacttctgaaaactacaaaaatagaaccgtggcagcgagccgattccgttttcgtaggtcccgacaacaacagagacacggtggcagcgacgactgtggtacaaaacgtgaccagaactcgaaactctaaacgaactagacgttaagaccagcaagatgacgtgacgatgcaacacaaaattcaacaaagcaaaaactgaaaagaactatgcaatggcacaatatggctaggtaaatgatacaatttctttttgtcgggctattttctggttatgggtagataaaaactcaccgagcaacgaaagctctgataccacctgatgcgaacccgctagggtttgtggcccgatctttcgatgagaggtaggggataactcgattggataaagacgacgttcacggcccgactacaaccgtccaaagacgctgcgccttagcaaccgatacactgtctccaatggtcgccgcgaacttgtggtgcgcgtcaacccggccacgagggcactcgtcctgcaagcaatcgaagaacaagcaagaacaagtagaacaagcactgaaattgctagataaagatgaaaatttcactatcaaaacacaatatggtgggggttctgattacaggaagacgagcggtttagccaacacgcgcgctgcgagccggtagcaagtagctatctctatcatcaaaacccgagaaaccctgaaggggtacctagctatttaaggatgtgggaggacgaccaacggtgccgtagggtcgttctccaccaggttggggcgcaccccacatgggccccacttgggccggggtcccagacgaagttacaagcccataggcccattacaggtgacgcaacatcttgtttctgcgattgccgtcgactaagatggaatctgagaacaagactggatccgttgaaaagaggacttggagggctttccatcaagtactcatggacccaaaacggagctcgtatgaaaatttggcggccgtttgaagtcagcaatgtagcaggtggccgaatcgaattccagcttttggaggacttgatcttgatgtcttcttgttgatccatgatgtgagcaatggttgtatccatagtagccatggtcacatcatatacggagggagttaatctacacagagttgctaaaccagaaatataattatgacagcttaggttgtttgactacgaccttattgttaagcttttgtttatacttatgtgaatcgcttatcaacagtttttaaataacttatgagtagaaattttatactgtatactactccctccatttcaaattgatctacatatatatttttaaggttattcctaaacgatatacatatttgtgttcattcattaagtctattcgttatctgtgcttggagtaaatggacattgatgcatgcatccatgcacacaagtatttataacccatatgcaatatctttatttgctattggctaggaaataatggggatggtgcatacattaagtctattcgttatctgtgcattggagtaaatagacattgatgcatgtatctatgcacacaagtatttataacccacatgcaatatatttatttgctatttgctaggaaataatgagtatggtgcatacatcgagtttgttgctagagtaaatatagtaggagagagttattattttttcttggtcttgatgtacttatgaaatatgtaaatcaatttggaatgcaggaaatatatctttagcgattcaaaagtttttaaataaactacaatgaaaacctataaaaccaattccaaaattaaattttacaattcaaaagttaatttataaatataagcataagctttgaaggaactatcacgccggcatgacatgcatgatgccgacagtccctgcattttcagcttcagtcacatctttgagtactccacttcattttttcagcttcaagctacttctagtactacttcagtacaaaacttttactgtcatagtgtcatgcaaatgtcaataagtgccaccatcacaatacatcaatgtaaagaaagactcatgatttttccctactcttcactccttaatttcaccttttctttttctcactttgagctttcaaagtattcaaaatacagtatcatgagggtcttcaaaagtcaggagaatccaatatgcatgcagcctttactgctagatttgggacacttgtcacagtctcaacgttacaacagtagtaaaaaaaaagttgcagtatcagctactagtaataatatctttttgctaaaaagccagggtgaagaaagttactgtttagagcaagtataatctatgagaaggcaaaatgctgagatggatgagagaggagaggatagagatgagaagcaggctgtaagtttagaaccggcttagacatagaaaccaagaaaatctgtgaaacagacatgtgaaacagacatgtggactattatattaaagagttaaccattatatgagtgagctgagagataggctataaatatctatacagtaaacaattggctgcattattatccgtcctacagatcgtatgtttgtcgtaagccaaattattttaaattaaattaaatttataaaaaaacaataatatttacgatatcaattgttatcatttggtccactatgaaatatatatttacagtctatttctttgatgagatatatgttattttttctaataaaaatttagttgcgcttagaatagtttgactcagacgaacctaatatcttttttatattttaagaatagagggaggagaagtaaaaaattcagagggaattgtcaaaagtttatgattacagttaagctagcttgttcaagcttagctgccgacacgatcatccagccggcagaaaaaaattgaaaaggaattgcaacttttgtagtatctctccttcaccactggactggagtcgtcaggtcacagcccaacagcttgttacaggcatatgctgagctacatgttctgaaatgacctctgcaaacgggtgaacctcgcagctgcactgcagtgcactcaactgcatctgaattctcttgcaaccactcaaattcagagtaaagaaaattctcatctgcagtgactgctctgactttatatgtgagattagtaattttgcaggccatgccgacatacacattggttgcttatctgatacctgtagaagctaagcagaacatgttcttgctgatgagttgcaggtgaagaggatcttatcctgtcaaatttgctgctggctcttatagatttggatggccatgatatcatcagctaatctttatttttctttaattagcttatactgtgaaaaattctgataggtaatgacagatatatatactcacatagcaaggatatctctttagcttgagtggtgtcatctcatgtttgccactgcaaataagccaataaaccataggctccaaaaggtattattctgctaggatatgatctaagattctaaggctctcttttatcatctcctaacagataaaaggaccataggtatttttacctccaattctatctatcaagaacaaggcctacaaatcatcaattgcatacttttattatggtcccaaactttatggatgcagcattacagctaaatgacatggaagaacatccaagatgcatagaaacgaattagcattgaagaggtgtgtgcaagaatctcaatggatgccaggctttttgatggcaatggctctatggtgcaatgctcctggtccaagtgcgtgcatatgattaggattgtgaggtgacattggcacctaatgtgttctccttggaagatagtacattgctgttgcaataccctacttatctgaatatatccccagtttatgctatgaaaattcagagtctgtgtttgataagtttggattgtgttcttgacatggacattgcaaagggaggttggccaagatctaattaaaaaattttgatcagctagtagaaaagtgaaggggaaaaacatacagcgcttggctaacttgtactgtactactcaggagcaatgtgggggtcacactgggcctgctctttgatgtctgatgctaggccctgtttagttcgcgaaatgaaaatttttaggtgtcacatcgaacgtttgactggatgtcggaagaggttttcggacacaaatgaaaaaactaatttcataactcacctggaaaccgcgagatgaatattttaagcctaattaatccatcattagcatatgtgggttactatagcacttatggctaatcatggactaattaggctcaaaagattcgtctcgcaattcccccctaactgtgcaattagtttttatttttattttttttaaatgcttcatgcatatgtccaaagattcgatgtgatatttttgggaaaaaaaatttggaaactaaacagggcgtaacagttttggtcagtttggacctactgaaagctattggaatcttctctgtgtgtgtgtgtgtgtgtgtttattttctttttctttctttctttttttttttttttgctcaagaggggaccaaaattgttgttgttgcaaaacctcataatccaagtagaaagtttctgatagagcaattcaatcagaaagttgtacttgcatcttgtgagatggcagaagccaaataggcagtgatacttcatttctgtcaggcaacagtataactctgattctagacaactttctggcatcaacttctgcaaacagtaacaaaactctaacaagaagctagagctaagctaactgatcaattattctgctaaatgattgttccagataatacactaactaagccctattcatgataaggctgaatgaaatcatcatccagctgcttgatactaccaaaaaaggagaaaaggatgtgttactctctgaacattcagatctctccaggttagcacaacttgccatctgaaaacagaaggccatgctgctactctacaatgcccagtttgcatctgctgtctgcttgatcagaagccatgtcttgtcccttgcaaatgcaactgctccttgatgcatgcatagcctccgatccaatagttgaagtcggtagccactgtgtacccatgcaaatggatggtgttgaggctatcagctattgcagaacatcaatctaaagacttccattttattatctggatactgcacttacacaatggaagtctgcaccagaggtgcactaatcactagaattattgcatgaactagagagcttattactactacataatgggatgatgtgatatgtgttccatatgaacaggtaatattcaggttcctgacaaatgtttgtgtggacctaaaatacagccaaatcttcagttaggctgattgatggctatgtggatcgccgtcgaatcttcaggtatccaaacttgcctgcacctggagatgagccctcgaaaacaattggtaggtacccggtagcagctttgtatctcttctgaatctgaaaacaaatgatattttgttagcatgcaataccatgaaaatgcaaacattatggtgaatcacaactctcttggagggtttatcttggatctttgtagttatggtcatccattgtgtacaactgacaataaaaaacgatgtcgaaaatacctcaaaaatctcttcactgcttttcaagcaatttttcccaatgacacaaaccgagcccccagatcctccaccagttatctttgcaccaaataaactaggaccaccatcctgtgaggtcttcctgtgctggacttcttgtaccatattaacaagcctgtcggttccatcagaaccaagcccacaagcattgtagctgtagtggcactgccagaaaacaaaagggtcaatgcagtgccactgactgctaattttgtgaatcaacatgtacagtgctgggctttcatttgtaatacagatacctgatacatcaattctccaagggccgaaagttgctcaactgttttggctgctgttagcaatgctttgaaggcctacacgtgagaagcataacaagtgtcaaaaatatcagtgaaaggaataagctattctttatggagaaaaaataaagctggttctgaaaaccatgcgctctcaagatagttttctgatttgcaaacatctcaaagaattattttaaagtttaaaaatacaaacaacgaggataaagcagcaaaagcagtagaacatcagacaacaacatgcagggatctcatcaacagccattatgaatcgagaggtgtagatattctggttttatgatatcaaacctcaactcggaagttctcgtatataggatgtctagtaggagccttcacacagtaagatcgttttgggtcaacagttgttactgcatcattatgatctccatacttctccaaaaatgcatccccggttatgatctctggaatatctctcgcgtaaacagcttcatatctgaaattttgccaaagtcataaaacctggcatacactatgaaggaccatataaaatttgctgtcaatatcaaggtaatgagacctatgaggtggtaggttgcataaatactccagcgacgcttcagatttcaaaagatctacaccatgttcttcgtattcatcagaatttgtgttgcctgattgaataggaggacaggagggtaatgattctgaaagaagatcagatgcagcacacttgatcatcttgcgtcccatgtaagtgcctacccttacagagccataatcagtcccaccaacactgcatgaaccaaagaagattatggttaactatgcatcccaacaataaaaccaaaccatgcatcccaacaataaaaccaatcttgcaaaagatatcaatatggaaagtatttacctatgtcgtatcccagagtcaagaccccaaaatcgaatgtgagttggaatgctgaccaactctttcacttctgcaggctgcagcaaaatttgatcaattaattatagaggaaatgcaaagttggactgaggaatgactgggtctggtagctacttcctccaagagctgggtacccttactaacctgacaaatcattgcaagaagtttgttagcttctccacaagcagatgtcatttgatccattacaccacaaggtgctccaacaatgcgattctcaacctgcatagtcaccaaagaatgactctctgcaatagaagacctaccacattctgaagctatatcccttcatttattagtactttaccttttggcagagtatggcaagatcccgtggagggatatttagacctgaagccaagacaagaacatgaattgatgtcaactagcacgcccagttaagttaaatgtgcaacagtggtggctgctgcagaactagatatccaaccaaaagaaagaaaatagtggcattattacaacaaagatgttcaagtcaatcgtttaccataggcagcagcaatagcagacatactggcaacctccactgatgcagaagaggagacacctttaccttcaggaactgatgaagaaacctgaggattcaaataaaattatcatgaatgaccaatacaaacattcgagttagaacacttgattgattagaatgtggaaggaaacacttgattgattagaatgtggaaggagaaagtgtgaaagatgctgttttctttttgtgactaataaacaatattccttttgagttctgaatatctctttatctccccaatatgagaaaggtgacaaactggacaaagaggtggaattttacatatattactgcattctgattgaaaacagaaaggatcaaagcttaccagaatgctcatgctgtctgtgaagaccacacctagctcggtcatcaacacaaggattgttccagcaacatatgcagcccatctgaaccagaaccaagaatgaatatgcatgacaagttatgatttttatagagtaaaacaaacgatctttcttacttttgggatgggtcctgagagaaatattctttggccttatcataggatattggtttgtcaccatccataaaatcagacaggtccatatcaaaggttggtgcacgattactcaattcagaaccaaatgatacctgtacagacatatttagtaagaagatcccagtcgtccaaatgagctgtgaagcatccaactaaatatatgctacatctttggttgtcaaatgaattaagttttaagaacgcataataaggataagaaaaggtaagcgaagatgcttagagagttagtgataaataacatacaatttgtaacaacggcactgctctgccatttgctagttgcctagcttgtgtatgcttccatagcttctgcttcataggattacttctctgaatagcaacatgacaagcctctcgaatgggcatctggtaatttggaccatctcaatgtcaatcgcatatgccaaaagaaactttctttatgttttaaatatatcaaatcaatcaataacttagtaacttacaaggagacataatatttattcatctatctaaaaataattgtaggaaggtctatagaacatgcatgtattcagagttttccaggtatatgtcaatatatcattccacaatacatgcaggaggaacccctaccttcaatggtatcaagaggagatgcaagcaaagttacagaaacaaactaaaatgatagtcaaatgcagaattgaagaatctttaaatattgaaaatttgaaatcatttgtgtgaaagttttatcacatagtggaattacaggaaggctcatctataagaaatgccactttctcttgcatttgaaactacctgtaatacaagacttcctgaataatctgcgatgccacccatgacatctaaacgtccaggtgctcttgcaacatatatttcctcctacaacagaataaatcattcgaaaatgattttcccctataacatatcaatagtttcccaaaaaaatcagtgtattatttttatgcttgtatagtacctcccaatcaaagaaaacagaagcagcaaccctctctcgagattgcttctcagggctccttggatcatttccaacaagtcctgataaactagttaaaaatgccattgtatcagttaatccttgtatgtccccatggagtatctcgaagtcctcaaaagatctgacaccaaaacaaaattatttgaatggacggggatatgataaagtgtgttattggataaagtacatgttattatgaggggaaaagaaaggatatggaaacttacgactctgcacttccattaacctcatgatatgttggtgctggacgaacaccgatttctttctcagacacagaataccagtcaggaattccgacatctctccctggagccctttgtagttgatatcctagcactatggcatcacgcaaacgtcttgctccgctcaactgtaattgtagagtagtgcaaatactaagtccagaagttgtgaaaaaaaaaactcttgtaactttaaaacttcataggttttcaagttccagagcagtagataaatcctctgttctgaattgggaattagcaactaggtggacagttccataaaaaaaatattcttgagcaaaagaattaataaaaacctccaggggtgaaatgattttaatgagtaacatgacaagaaaaggcagaagtgtttacttatgttcaacttatcactttatatgtgtagtatgaaagcaacaaaagttccatacgacaccaaatacagataactgaagatatcaaagtctcacttttatctgaaagtttcaaggtacaactgaacaataatgtatcaacaatttatgttagtaactcaccttgccagaaatatacttcttgccaacagcagtgtcctggaggatatgtgcagccacctgaacgaataattattagcttatcttgtattataaatgcaatcaagaaagtctgtgaatcacatctggtttgaggaaaacatgatgcaagtatccagttgactcttcatgacttacggaagaattgattcaggatgaacttcaacctatggctagtatggtatttcagttttaaaaatcagccatcataaaaaaaaaataaaatttacaagatggttactagcttgagttcccaaacaaccctcacagacccatatctgagaactgtaaggacattacctcaccaccatttattggaccatcatagcatggatgaagtgtcatagcacgttgcagataaggtttccagtgtccagtaagtaaatccctccgtaccatctcaacgccacattgataatgctgtttattaggaagaaaagaggatatagaacaggacatcaaggttcatgactgatgctctataagtacgaattcttaaaatgaaactatacttcgagatgtttcaacctcaagcatattcctcaaaaacggctcttcattgaaataatctctacgaacaaatacaaatggcagcttgtaagccaaagcctcactcacagtgccatatccaattttccctatgcaacaaccaacagaattgttacatttctagaaaagaaataaggcggtaaatagccctaacacagataatatagcactgtatttaccaagcatgcagtcagatgctgccatcaaatcaggtgtataggcgtcctttgcaagtttaatgaaatttggtggaagctcttgagtttcagatgcaccacatacctttatgaaaatagaatttggtcacaaatgttgtccagacattattaagagagagagaaagaagagagaagaaaacacgtagtttcaaagaaaatataccaaacagagccaaccatcaggcagccattctttcttcagtttccatcctgcaggctgaagaggaaaccatcacaatggcattgcatcagcaatacttgcataagatggtagcaaattcaactatggattgtactgactaccaataacagcagaaagacagaaaccttagctggtctaaaaggacatattgatttaacataaatatagccctttcaaaaaaaaatgatttaacagaaatatgcaactaacatccattaattgaacaaaatcgagcatctataaacgagaaagaacattcaggctatttaatggtttacctgtcctccaaagttgaaaatgaccaccttaacatcatctttaattcctaattccttcctcacctgatatatggagattttttaagtcatcaagaactgagaacatgggttgagtgttcagagcaaacattgtccagcagagttgtacgcacctcagatctagatttatgcaatcttctcaccacaagaggaacatcaatgacatcacggaaagcaggcactgcagaagatagaattaatcacgagtacttcaaaccaacatgcaggatctttggatatattattcattcagacatatagacgtactagggcagtatccagggagtcgtagtaagaattcacaatgtgaataatcttctgctatctgcagttgatgccaacataaatgcatggttattgaacgggctgaattagtctcaacttgcaactaaagaacgatattacagagaacagttttctcaaaaaaaaatcaagaaatttgaatccggtgtctaggtggctttaggaatttagtagttagcattagcaaaccaattagacaattttgcaccatttttgggaaatgaaatgacaggcacctgccacacaattgagcgatgatgatgtccagctactacgacatactctgcataaatgaagtcccagctgcaaatagaaggtgaaaattaaagaccgtgctttgattcaaaaataactactcaaaaaagaagcaagaaaaactgcaaataaaactatccatgtaaatttcttcaatagcccgaattataaaaataaatggagagaaaaaattatgtttacaactagtcaatttcgggtaaagccataactaaaatttattgttagcatcactcagagctgcagatttcttgtgggttagtagataacttttgtgttcagcgttagtactgattacatcaggaaatgaatgttagcaggcaaaacatataaaagtcaggtaactgtagcaactatgcactgatgaaacatataaccccaagcaaaatgttaacataaacttggaataatatgggaacccacaaaggctgtaactaataattctaaagctcactctacatcctcattgctccttttgacccctagcatgaagcaaccacagaaacactaacctgaaattggtgacgcacaccgatcgaatgccagcatccgcagccgccctgcacgcgacggggacgacatctgaaacctgaccaaagaccaacaacaccacatttgcttcagatgctgtaaagattcatggagaccccggataaaaacagattaaaaaaatcgagcaagtagttggtgttagcatcctcaggagcattaccactaggtcggccttgatcgtgttgagccattccacctcagtcctcagaatcgattcgcgtggcatcacggccgtctgatgatactgcattccgcaccacacaatcactcaatcagccacaaatccacaggcaaagcacagcacagcaagagcaagagtggtggatgttgtagcagtagcaggtagtagagtggagatattggagtatgtttctggaaccttctcgagggaggcgaggcgatcgacggtgagggcgtcggcctggacggcgccgcagtcgaggagcaccttgcggatgtggaggttgggcgagctgatctcggtggtgaagacgaactccggcgcgccggtgaccacgtgcacgtcgtgccccgccgcgatcaggtgcctcaccacctgcactaaccacaaaccaaaattccatcaccccaaataaaaattaaaaaaaaactcaaacagcagcgaatccatccatccagccacgaaaccaaaattccgcgcagaaaccaaaatttcatcgcacggagacaaacacgaatcaatcctccccaaaacgagaaaaaagagaagacgagacctcgagcgcgcgggtggcgtggccgaagccatggccggtgatgtagtacgcgaagaccagatgctgcggcggcgccgacaccaccgccatcgccgcctcctcctcatcacctccgccgtctccccgaatcctcatcgccgccgccgccccaaatctcccggaatttctcccggaacaacaaaaatcgacacttattatcagagactccacactccacactcctcctctcctctccctcttatataagtcagacgatcagcaattgattgattgggagacgagacgacgtggactcgttggttggtgttatccgaattaacgaactgccacgcctgaatttcttttgttgttttttttttgggttttttttgttgttggcgcgatgatttgttggtggtggatggtggtggtggctgccattcccgcgaatctctctatctcttggtgtcattgccgcgattcgcatggtgcctgcagaatcagggcgcaacaaaagagcagatggaagaagcaacagcaagtagtagctgggggagttaggtttttatcctatccaattccagtagcagccaggacgattcgcgtatatcctatccaattgttggattatgaatttatatccgattcgttgtccaactagtccaacctcctctgcaattgatcaaacaaaattaacctgtaaaggttaattggataggataaccttttacttaattggttaatactactagattttaaagtagaggctagaataaattctacgattggaaaaattcttatgctttctaccttttgtaggctttctatcatttagggaaggtttttttataattaagtaaagtgttaatagtgttaataaattaaccctttagttaatttgataacattcttttgataataaattatattataacaaaaaaatgctaattttatagtgcttcttaacggtttcctggaggtaacacattttctatgcctccggttacactaataattttgtatctttagttacatctcaagaactgtaaaattttgccaaaaagtatcatgcttagttactccctcttttactaaatgtttgacgccgttaactattttaaatatgtttgaccgttcgtcttattcaaaaaatttaagtaattattattttttcctatcatttgatttattgttaaatatacttttatgtatacatatagttttacatatttcacaaaagtttttgaataagacaaatggttaaacatgtttaaaaaagtcaacggcgtcaaaaattttgggatggagggagtatttggttaataactaaacataatataaaatgtggataaggataattaacgttgtagaggtatttagcatggcatgagcatgcatgtagatgactgaagatcataaggctataacaaaattggcatttttcaaaccaaactcaaggaagccatgaacatgttatgacatccttcaatttgacaccaaaactcaaaaagaaaggatcttgagaccaagacggaacatataacatcagtccaagtcatcaactcaacccatcgaaggggttgcgtctacgccatgaccttgacgtccatgaccagaacatggcatcgtgtaccgcttgtccctctgcttaatttggcacttttgagttttgacttcgatcaagggatttttttttctctctatgaattctattaacctctaattttttaataaacgacgacgttaacttttggacgcatattttagcatctgtcgtcatactttaaactggagtgagcaataatcaattccgttatcaactatgcaattttagaaaactgcaattttaatgacaaaaccaacattagcgacatgttttagtttactacaacaatagcgtgagaaattatcacaaaactgtaatttttacgttatatgctgctacagttgttacctatatgtactgtaacagcatatataacataaaagttacagttttgtgataattttccatgttattgttgcagcaaattgaaacatgtcgttcatgttgcagcaaactgatagttatggcactaaagttacagttttttaaatttactcatggatatattatcagcaatggttcagttggtcacaaactcacaatcgcaagatcacaaatgcagccagcagcaagtccaaacgcacaacaacaacaacgtcggctgctgcaaacctgtctgcaacgtcgctcagctcagaacacccagtgcagcgtctcgtcgtcgtccttcctcggccggccgcgccgccagctgctgcgtcgtctggcctcgcgcgtgacgaccgtctcggtggagagcacgtaccgcctcacggcgcgcctcgccatgcgcagcggcgccttgccgctcgccgacgcctccacctccactccggtcaccaccgcgaacctctccctcacctccgtctcctcctcctcctcctcgccggcggtggcggcggcattgaatccccagcgccgcgtcgtcgtcttcaatgaagccttcttgttggtatcgagtggtcgtcctcccacctcgacgcgcgtcgtctcgaacagctcggcgacgcacagcctgccgccaccgagctggacgaggtaggacgccaccggggccggccaatccttgtgcggcgggcggtacctccatgtgtggcgcagcgacgggggcgtggcggtgaggtcggaggcgcagaggtggccgtcgtggtgaggggagaagccgaaccagaggctgtgctccgggacgtgctcggcgcggccgcggaacgggagcgcccagtcgccggccttggaccacgcgccgctcgccgtgtcgaaggtgaacgtcccgtgccgctccgtggacacccagatttgggagtcgcggaccaccgcgtgggcggcgacgcgggcgggcccgtcgtcgccgtcggggtcgagaacgtagggcggcgccgtgagggagcgccagtgccagtcctcgatgatggtggcgccaccccgcggcggcgccggcgggaggccgtggacgagcgcctcgaagcagtgctccgccccgcgcatccgcgccggctccggcgccgccgcctccatgacgtagacgccgtcgccgacggtgaaggcgatggggcaccgcttggtcgcgcgcatgtgggggaggaggcggacggcgtgggcgccgcacttgaacaggatcagcaggaagctgcggtactcgccgtccacaccgaccaccttgtccttgccgccacctaggatcatcgcaccgcacctgccccagccgtggccctggggtctatagatggcctcgccggcgcgaggtagctgcgcgtccaccatcgctgccgccaccggcgccaggcgcgggcgatctgcggcggctgatccgtcgcccccgccggttggctttctcggcgggaagaagcgcgacatgtcgatgcggcggagcccgaactcctcgctgccccacggtgtgggtttcttcaccagcagatgcagaaaccggcggctcatcctacaactaccgatgaatttctcgacggcggcagcggcagcggcggcggggggcggcggtttcttcctttggccgtaccggttaaacccctagcttttcgcgcgtccgattttgtactgataacctaaaagatatccccttgtttggacaaaggtatcctaacagattggctgtgtttagttcacgctaaaattgaaagtttggttaaaattgaaacgatgtgacggaaaagttggaagtttatgtgagtaagaaagttttgatgtgacgaaaaagtttgaagtttagaaaaaaactttgaaactaaacaaggccgtagtttgagtaaaatttctcaaatttctgtttgaaatctacaggatacaaatatgtgcaatacaacataagaaaaggaacatatcaagaagatcacaaatgcggaagaggcgaagagcattgaggtggtaaatccaaaatgctagataaattaattggatgccaacatacaggcttgtgttttttgtaacaacaacagtgtacactctctactaaaacactaataatgggcaagatcaggactatttctaggtgtacactgaaacactgaatgggcaagatcagcactatgctagagggagctactatgcacataacaatcattttaccaattgatctaatgatcagcactatgcaccacatggcagccatttgaggtactagtcgtggatgctaactaactggaggatttcttcatccttcctgtaagtaaacagcagcagtcaattcacaacaatgacatctgaccgtcaccttgaccacataacaggtgctgaagggtttggtagcgacgatggggtcatgcagtgttgttgccactggtgaaggctttcgccatcgattgctgcgacatttgcttccggagattcctcaacgtccatagaatcgacttctgtctcatcagactccattggcacttcgaagaattctctcttttctgaatctgaagcagaccaattagataccgtggcaatttgtggtggtgtccaaggaactaaagccaagaagttgctgcacccaggagatttgtcctccagcccgtgaaagttcctttgcataaaagcctgatctgaaagatgagaaagaaaatggtgaggagcaatttcaaggtatggatgataatcctatcctgacatacaggacatgagtataacactagaaaatacatacacataaagtccggtgcgccatacaaacatgctaaagtagttcagcgggctttcttccttaaagttaatcatctaatgctcatcacttaaaacagaactcacacaaagaatgtcaccaagtataagtgtgctagaagtacagaggcattttaagacaaaagcaaatataaaatcaggagcaacgcgtgcagctaacaaacttgcatgctagcaacatagccttgaatatttgttctactactagccagttgccacaaaactaaacagtgagatctttgcaagataagttctgtgtatacttatttcaatatcaaccttggatgcatcacagatgtagtatgtaaaacactaaaacgcctaacacctaaagtagcaatagcatcttctcctatatatctatcccatttgacacacgctcgacatactgtaaaagtacaaaataaagtattgcaaacattcaaatattcagaagaatacaagagtaagttataataatacaaaatgttaagtaacttactctttagactacgtatcaagtctggactgattatgattgaagggttcgaggtcccaggaccaatgcatgcagtgttatctactgacttgtataaaacaagtgccttgtcctcacttgatggatgagattccatggcacctcccagcatgtcttctataatgggcatgctaacaacactgtggatttcctctcctagcatctcatgtccaaatggcatggaaggacctggcgtctcttcttccataataggtggaagcccaatatcctacaaacaatagtcgacatttattcagcaaaatgtgacggtgcagcaaatttattgaatatgtacttacagggaaagtaaaatattgaaaaccaaacaaatgctagaaacgatataatgcgcatttatatcctgaagcaactagccaactacaaatgaaacctagttttcttcaagcataacactcctactggttagtggtaacattgaatgaggtatcagaaccaaggtgaaatatggcaatacattgctcagtactgagaatatctcccactagaacactgagtggggatggtgatgtcataacaaaatcatgcatgccacgcccacaccaatggtggacatcttattaacaatgaaagaaaacaatgtcaagatgataaaaaaaaaagaaaagaagagatgatccattgaagtacagtgaaccacaagaaaggtttgctagtggttccatacagattttgacgaacagaaagatagagtcatttcattattaattaggaaccctctgtgataactgttactgctgagcaaactcatattggataatgctacaatgataaatttggagaggatttatggtgctgataaagcctatataatgctccctccaatcaaaattatagaactaagtttagttctccgaacgtcaaatattttgactggagggagtatctaaattataatccattgaacaactacatgaaagatagtttagggaaacagctggtactcaaatacatagtagtattagctatgctttcactcagctattttatttcgttgggaatccgttgttttctaaactccatcatgcgacacacagatgtaaccaagcaactccaaggtactgacaagcaagaaaatgaaatccggtaaacaaacatactgcaataacacggtagattcttggatgggaacagttgtcatggtaagcccaagatgacactttctcagtgcatttaccatttttttctcagcctctcttaataatctcattgcaaacacggcacccgcgcaaaatcagggcatccataagcatcccgaaatacaacctaaaaatgcaccaaactacctggtagatatcgcataatagtactccaactaacattaaaccaagcaagctcataacatgcatcaaactgctactagtaaccagtgggacgcctaatcatagctataaaagtaaaaaaaaaaaaatatgattccaggctccaagcatgaactacaatagaaatatccgacttagagccaagcacaaagctatgaaatctaacactcgtatcgaaacagtactagagcatgggggaagacagctcggctgctcagctacacagaccaaacgaagccgtagggacgaggagagcaaatggcggtggcgggagctcaccaatctgcggctcttggcggcggggccggagagggagaagtcggagaggccgtccaccacctggtccagctccttcctcttccccatgaaccccaccatcatccggcttcccccaagggaaatcaatcgtgctcgaatcccgcgggctcctcgcgagtcccgagctcgaatcgaggcgcggggatgctgggaatctgggactgggctgtggtgggattgccggccggcgggcggcggcgcggggagcggcgggtttcgcgggatcttggcagatggaaggggtggggtttcgcgtgtccgcgtggggtaattttgcgtgggtgggtgggtggtgcctcgcaccggatggatggttccagaagacgggtggggtcgtcaatggaaatcatccaattggattggtcttagggcattaacaatacgtcacactagttgagttgaggagcctcggggtgtcacataggatagggctagaggtctaaaatttggattcttcacggtgcaagtgtctctaggagtttatatttcagcccctaacattttttttagttcttatagtttctttaatttatgtgaagttccaaaatttacactatacaccctacaatctctactattataaaaattaaagatgtttttgttggtactttggtacatcatccgtgtatgagttgatttttaatttcgttcgtttttgaaaatacatatccgtatttgtgtcggtttttaagttcgtttgcttttggaaatacagaaaagacttctaattgtagctcatgattttcttaaaaaaaatatatttatccaagcgaatttctacagtaaatttcatcttaactaaaccatatctctactattataaaaattgaagatgtttttaccagaattttagtacgtcatccgtgtttgaatcggctttaattttatgtttcggttttaatctatatctctactaaaaacaataaattctggtcttatgttaaaaaaagaaagaaataaagtccaacttaacgagcgataaaaaaaacttccgtcgttagtaaaaaaaaaagcatctcgtcgcttgaaaaaattgtccgactcctgtagaaaaggaaaaaaaatctcccagtaaaaaaaaagtccgtttggtttttttcactggtattttttttccctttttatgtttggctgggtcaaagaaaagcagaccgaatggaggaaggtagcggacacggaatagcggactagtctagggctgaaaaggaaggaaggctttcggccgaaaacacagaaaatatttttattaacctttttaattattatctatagcgatcccaatgttaagatttttattaacttttcaattatagtgtatagtaatcctgatattttttattggtatgaaatcttaggtaatcccgattttttgaaatcttaggtatgacaatctgaaaatttattggtgcttgttttgatataaaatctgaagttgcaatgttgtttgttcagaaatctcaaaaacgttatagtactagttctgaagctgataatatgacaagttttacagtgagttcttgaatgaactagctgataattgaccagagactatttggctacatgtttaataactttaaacttggttagtttcaagaaattgtagcagtgaatgtagcacgttctgaaaattttacctcggtgctgtattttgcttctgacggatataaaatttcactgtattagattcatggcaactagtcaagtactgaactatcgtgtacatgtaatggatgttagatttaattgggtaattaatccatttaaatcaattaaatcaaataaatttcaaggctcattatgctaggaattcatgtgaattcattcttctatgggatatcaatgggatgaagagttttgagaattaatccatttgattaaggaattggtaacttatatcaattagtcctaattgatggatggttgatggttgtgtagtggaggatggttcatggctagttgatgacaattagttgctctattcctcttcctattccatgactcttactcttcatcttccattcctcttataaaatgagaatggatttgatctcccgcgagaagaagtagacacactttcatccattttcaaaagctgttgctgctacggtaatcccatcccgacgagtgtgtgcacacgcgttgggagagtaggcctccgaaaccacgcgttgctgcgacgtttgcacagacgggcgggcgatcaggtttttggggagcgcaaggcgcgactactcactgttcgtcaacatctacttcatcttcaccaacatgtcgaacactggagacaaggagaaggagactcccgtcaacaccaacggaggcaatactgcctcaaactccagcggaggaccattcttggggtataaccttattacattatttcaattagaagttttactgttaatgttcatcgcaatgtcaacattgtgtcattatgtgattgttgatgcttattcaacgttaagcatgctcatgttgattacattcaccactatcactggatcaaattctattgtaaatatcatgtttattatcttgttattttggattaaaatatgccgaattatgaccaaatttccaacaatggatacatatccaggtttctaaaactactagtaaaatgtaattggttctgttgtgctttcatacattttccgattccaagttactattggcatgtgtgaatgcataaaagaaataacttgctgttgtttgttgttcatgtgaaaatggatggaagtgtaaaaatatacaaaagctcttctgttcattgcaggtgatcatttgatatgctaccccggtgcatttaacatgactacagggccattgcactgggagttgctgcaaagagcaaggtattacattttctaaatcatttgcacctgaaaatattacgatcattcaacgaataaatatgagcttaagggacaaataagagacaatgaattggactggtaatgaatttctaaaataaactcaaatgtacagacaacttaagcttggttagtttcaagaaattgtagcagtgaatgtagtgtatgtagtatgcacattgtgtacagtagcatatacttctctatatgataaagttgatcctgtacttttccatgtgttatggtgaattggtggtgatgttgtgaggtgatccatgcatatattatggtgatggcagaagattctacaataaacaaatttgattttcctgcaacttgtaaattcgcagagagatagggcgaggagtttgaaagaaatattatggcggtcaaagaaacacctgatgaagcacagaagcttgaagagttcttatgcgtacgaagagaaatgctgaaacgtgtttaactggtgaatatgtcgtctgttgctttgccgtgtaaaaaccgttttatcctggcacttgtctgcagggtgcctgttctactaggacaatgaggcacctgttttgatagctctcttttcatattgttcatgctgtaaaaaatgggtgcaactgtttatggagaaaaaagtgggggatgcgaatcatactttgttgtgggaggatgtgtggtatgggcaaactcctgttagagtgcaatacccaggcctgtatggggtcagtttacagtgtgggaagactgttaggcaggtctgagacgggggggggggggggaatgggatctaaagtttttagaagacatttgtgtggggggagtttgttggagctgcaagatcttcagaataagttgagggctgttgacatcacttcagactgtgataggatcatttggcctgctaggaggaagcgggagtacaatactaggtccatgtatctctactacttaaaaagtccgtagtggtggtcttgattcctgacatagcagacgcatcttacagacatgcataatctcaaccatccgattgccatatccaatagcgtcaatctcctccacatcacgcgatcgctcctctcccatcacgcgctcgctcctccccatgcccactcctttccccacgccgcgtccttcgccctcctccctgcgtcgcctcctcgccccgccgtcgcgtcgcctcctcaccagccatgcccaccggcctcctctccagacccccgccgccctctccaatctccacgcctccacctcgcatcggatcaatcctccaccttcgccctcctccctcctttccctcccacacggaaaagtctatacgtactaaatttttcttacaaaatgtttacaaactctgatgtgtcaagctgtgagtaaatctagatttcttgtaacttccatctagttaaatcaaatggttgagaaatttgttagtaaaagttttgtaagaaaattttagtacgtgtagcagtactcctcccacacacacgactcgcgccaccaccggcccctcaaccccgccaccgcttcttcccttccgctcctttccctcccccacccaccggcgccgctaccgatcccgccgccgcactaatctctctcgccaccgtcgcccgccatctccttactccgcaggccttcggcacgccgcagacgatttccacgccgaccggtcaccaccgacgccgtcttctccctacttcaccgcaggtactgcttcattgcttccgctcccaccttccccttctctgatcttttatgtcgctcccaccttcctcttctctgatcttttatgttttatgtggtagcttgtggtagctaggtcttttatctatactttccctgcttcttcttcttcttgttgtgtttttgttgctggatgagtggattgatcaaaacgtatgtcctcatccgagagaatcaacaaaaaatcatataggcatcatttatgtttttccatttccactttttttcactaagtaaattaaagaaatagtaagtttgcagtagtgtccgagttgtgaatttactaatgaaaacatccaaactgaacgaagtttgttttgctgtggcccttattattgcatgtagaaggccagcggtattttatttttaaaactctctcgctaatttggtttcatttcatttaggtagatactgattaaatttttaccaaagcaaaattacctctatgttctcaaatagaccgatcttgataattatgggataatttttgtgagattattctctctattctcatatataatgatttccatattgtttaacaaagattatgttcgatcatataaaactttgtatccctttaccgaggaatgataggagttgagaaaatagtttagagtcagataaaaagaaatttgaatgggaggtgagattgaaggtaagttattctataaatccttatatttttttaataaattctaaacatttgcaatgcttatatttgtagatagagagtagctacctttatgttattttaaagggattaaggagagggcaataaagttaaatggcagggttgtgttttatttttgtttttgatagaaaatgttaaggttatgattgattgagataaagaagcatatgaagaaattaaatagaaaatggtagtagttggttgagatgaaggaatatgtaaagtacgctaaattttatatattaaaggtatttatattttgagatgaagggagtaataaaattggcactacgatggatggagttcttaaatagaaaatggttgtagttggttgagatgaaggaatatgtaaagtacgctaaattttatatattaaagttatttatattttgagatgaagggagtaataaaattggcactacgagggatggagttctatcgttgcgggtcactgagacgagctgctggtactctccatctatatttatatattgtgtagtagtattatgtttatgaaaaaatatgtattttatttgagtaggctattttgtctaggaacatatgagttctctgccaaagggcattttgtctggaagcttcatgattgatctaatggatttcgctgtcattcatgattctcctgtgatccaacggtctatatatttttaccaattgaatctgatggtccttgcaattttaatttaatgaaaccgttccatttgtgggatattctattcgtagactgtaaagaacagttgcataagtaatcttaaaatgaactttgataaatattctacttatttcaaatgcagttattacattcagttgataattgtttataatggtcgatttgctcgcatacattatttaatacctgtatatttcagaatattccaactattgaggcggacgcaggttgacaactgatctaattaagcaatacaggatccttgcgtgtaagtatcatatgctcacagcccttttaatatagtacgaaattggggatgatcagacctttgtgttgaatttaaagattcctggacagttttaaagtatcttattctgtttgaggattcaaaatttggattgctcaggtgttgtatgtacatatttgtagtatgaaagaatgcgatttcctactttgatcactaaggaaatcgggcacactacaagactgagagtctaagtcacatgaatttgtagattaactgttgcggatttacatttttggtagaaaaaaatctcaaatttgccttttgcattccatctggcactaacttagcctgctactctagcaaaacttacgatcattctaccgttaaacttacaatctgaccaaaatacactgggtgcataatcctcagattttcttccaatttccaagttaagattgtttgttctgacagtttcatccatccagctaatgttatattcatcggtcaattgatatattattgcttgctaattttacaatcactcctctctcaggtccttttgctgatataactaatgtaattgatgctaatttgacgaacaaccatcccgctattaataaaaatggaactaatatgccaaaagatcatgagaattgtcaacacaacaacttggactctataggttgggcgtagcaccatattatatatttcgtttctttttaagccttttgtattaagcacagtttttgtgtgcaggcactcttgaagatgttacaaaactaagtgcggctgaactaaaaaggaagcgtgctagggagtggtacgcatcattggccaaagatcaaaagaaagatagaaacaagaaggcacgtgatatcaggaagcggaggaactatgaatctcaaaggtttaagggggtgtttagatggggctaaaactttttagcccatgtcacatcggatgtttggacgctaatttggagtattaaacatagactaataaaaaaactaatttcataaatgagagctaatccgcgagacgaattttttaagcctaattaatctataattataaaaagtttactgtagcatcacattgtcaaaatcatgacataattagactcaaaagattcgtctcgtgaattagtccaaggatatggaatgtgttttgtaattagtgtatgtttaatactccaaattagtatccaaacatccgatgtgacatggatttggaataagtccctggaaaccaaacgggccctaaatctctactgttgtgttgccttctgcttcaccgtgacaagctctgttagatgtgatgggtaccacctataggggctctgctacagcgatggttcttcttgctcattgtccaatcctctttcaaattgccctcttgatcaggtaattaggtactgtactatcttaactaatcgatttgcttttatctatgctttccttcatctggttttgcttctgtttaaaggtgtgagtaattgaactgatgaactttgcccttgttttcctcgtccactgttcatgatgtgttggaattgtaacattttcattttatttcacattgacagcatgaaactaactttctactggattccacttgtggtgtcagtgggagaagatatatgcttaggacttcattgagattaatctagaagatatatttggactacaccatatgtttacgtgcagctgtcatgtatggtgacctttaatttggatttatttatgatatctttagttcttagccgtgaaagacattatggtatgtttatttgctgtaaaaaaaggcaattatttgtgaagtgtaaagttaagtttggacactttatgcaattatctgtgtagcacatgcacatacctgtttgtgtttttacatctatgcacatgcaatacaccgaaatactttgatacaattttgttgagggtgatgcattggttcagaaattcaattctggccgtgtgcaggaattagagataatctatatatgaacttgcagtcgtagaggtacactgaccaaacaaattgttattgaagagaaaaaaatatctaaggtttcactgaatatttcaaacgaattgtatattctagagtaaattccctgtgtgaaaactcactcaatactttctttagctaatcccttctatacccttgaaatttcaacttgatcccttccatgcccctaccgttacattttccatcatttcactattacgtttagttacaaatgaccttttttcccttgatgctttaggtttgaatataaccttcaaaaacaattaaaaattttgtttgagtgcgcagtatgtgcattttatgaaactaatgagactaaataattagtgcagaaaattttgacataaattttgaaaataaaacaaaagtaataaattgaagtttttatttgaaattttaataggacaatggattttttttatcgggagcattcataaaaccattattgtgaacattggtcctatatttgtatgaatgctcctcattttttatgattttttttaaaaataaatacatattttttatttcattatataaaaataattttggggataaataatacatcgcacaacaaactcataactattaatagtctcatgcgggaaacttttatatttttaataatgtaattcataaatttatatattcatccgaagggtaaaatggtcatttttatagaaattagacggtcaactaacggtcaactgacgggaggggtatagaagggatcaaaatcaaattttaggtgtatacaaggaagtaagtgaaattcaggggtatagaagggattagcttaatttccaggggtatacaagggattttctctatattctaagcctccatgcgagataagagttaacgatcttgtgacctactttttgcgagcacttcttggatgccctaatattatgtttgcttagtgcctttaaggagaaccgaagcaatgctaggctcagtgtgtggcgtgttgtagcatatagagatgtgttcgtaccacggaaatgataagacattttaaggatgttttttattaatcaaataataaatctactatttatatattttgcctacatttattttcttgaatatataatttataatttagaggcaatggtaagtcatatatatgtttcttgatatcattcatctgtcatgtatgcttctatgtaaatgtcacaggcatgctactactagtagattgttaagttttggaggggttattgatgcagaaatgcaggatgtgtggcaaagtaaagtgcctcttaagattaaacactttgtcttcttagctttaagagggagaattccttcaccctatttttttagggtttgcagttttaccctcacgttttgaaatctgaagcagccgtctaccctcacttgtgacaaccgtttggtgggtcccatgttgtgcgttaaagaaatactaaaggaaataaaaaaaaggttttaggaattgtgatattacctttgtacccttgagggaatggatatggttgaccagttgagtgagtctcccaccccgtgcgtcactttgcaggccgggggcgccggcggctgcggcaagggcggcgagggcggcgcggcgcggaggtggcggccgtgggcgcgcacgaggcggcggcggcgagggcgtgcgacgcggtggcggcgacgagtgcgcgcgcgcggcgcggaggcggcggccatgggcgcacgcgcgaggcggcgtcggcggacgcgagcgtgccgtgcgcgaggcggcggcggctgcgggcgcgccgtgcgcgagcggccgagggcgtgcgccggcgcccgctcccaggaggtgcacagccgtgctggcggcggcggctgccgcgtagagatttgctgtttcaatttgatgagcaaaatggctttgtatcgacatagtttcagaaatggatcgctaaatgttacttggtatttggtattttgttgatatgcacatgcttgagaatatgcacaaagggcgcacattatatgatttatacaccagttgatcctcttctgttcgttgcagtgaaggtacgttgattgttcttcaacttgttgagacattccaagctaaacttaagacattgtgcctgaaaacatacgccctttgtgcattataaagatggtgagtgacaaaataggggcaaaatcacacaaagctgaaaacaatagggcaaaaatgcaataaccatcgagggtataaatgtccttttctctacaactaacaccgttagaataggctgttagaagtggggtacacagctgctttagattaaaaaagtaaggaaaaaactgcagaccctaaaaaaaagtaagggtaaaacagtaattgactttgaaagtgggggccactgatgcaattgcccaagaagaaatgggatggcgcggggggagggggggttgatgaattagagtctgtgggcttggatttggttcctgggaatttggggatgctttgcacttgctaaaaagaaattgggaagggtcttgggcgtgtttgtagttgcggtgtgtatttggacgatttggctcactaggcgtgtatttggacgatttggcttactaggaatgactgggtttttgaaaacattttggtcaaatctcctttgcaggtggtgtacaaggttgttgctatgatgcaaagatggaaagagttgctaaaggagggcgatcgagggcaagtcgataagtggaaggaagtgatcctggagaatttggcgcgacttaggcagctgtgtgatcctcctgaagacatctgatttcggttttttttttttttttttggggggggggggggggggggtgggcgccgggtgcttaggggttccggtttctgaggccttgctatctatgtgttagtggtattttgttcgcttgatatgtagctggagtcccctgccatctagtttcctcgtttttccttttgtttcttgatgactgagctctttagactcagaagactgtgttctccttttggcttggttttcaagctgggtaatgaattacctgatctcaaaaaaaatattgttcttcgacaaatataagtgatgcctattactagtactttttttggcattcaagggtataattttgaagcatgctatagcatcaggattacggattactttctttacttaactcatgcacttttttttcctgttttattaaccagcttcgaggaaaaagcattttgcaacagagaattaccatgcacaagctgctcttgatcattgcaattttgcaacctccatgtttggcataagcagagcagagcgacataaaaaaatcactggcctattatattctctattttacgcgtgaaaacaaaaaccactcgggttactattatttaaataaatcaaactttggtgtactatatcacagaatatattatagcagaacgttttttttaaaaaaaaattaagtccgggtgtccggaccagatcgaatataaaaaacctcgtggtttttcggacaagcgtgtataggaataaatgacaaatattattttaggacacaattggttaagcccggaatccgtccggtctacccggactaggtcgaatataaataatcattgtttttctgtcgagcgcgcatatattatagcagaacagttttttttttaaaaaagattaagtctaggtgtgtccggaccatgtcgaatataaaaaacctcgcggtttttcagtcgagcgtgcatagaataaatgacaaatattattttaggacacaaatggttaagcccggaatccgtccgatctactcggaccaggtcgaatataaaaaaatcatggtttttgtgtcgagcgcgcatacattatagcaaaacggtttttttgggacaaaaaagattaagtccgagtgtgtccagacctgatcgaatataaaaagcatcatggtttttttgtcgagcgcacatagaataaaggacaaatattattttaggacgcaattggttaagcccggaatccgtccggtctacctggaccaggtcgaatataaaaattcgtggtttttctgtcaagcgtgcatatattatagcagaacggttttttagtgttcgaatgtaatttgttggaactttttaaaaaacatggtttttcggtcgactgcgcatagaataaagtggaacggattattttggacaactagttattatgaagccatgatcaggtcgattttaaaaaataaagcagaacagattattttcgggaactagttattatcaagccccgaccgagtcgattttaaaaaataaagcggaacggattattttggacaaataactatatgtacagaccaggtcaatttttaaaaaacatagatttccggtccaccgtgcgtagaattaagcggaacatattattttcgacaaataactattaagaccgggattgtccgagccaggtcgattttttaaaaaaacatagttttccggtcgaccgcggatggaataaaagacaaatactatttatactattttaggatataatgtcgaatattaaaaacctcacgatttttttagtgtccgaacctaatttaatagtgaatctctgaaaatatccacgtatattctcagcaagtacagcccataaagaaatttggaggccatctacgaacgagtgggcctgtatcgagaggcccatcagccgaagcgctatttggcagcacaatctggaatccatgcgcaattacataatacacccccctaaaaactgaacttacaagaataccatatgattttttttccacaattactcttttactacactactactccatccgtcaaaaaaaaaacctttgagggatgtgattcagtttatctcttttttgacagagggagtacacatttatattaggtgtagtagcaacgaattttcacccttatatctcatctcttcaatggtctatattcatttagaggtacactaaaaaaaatccatttaacaatggactcagttgttgtttccaagtgtgaattaagttacgtctaaccaacaaagacacacacgtgttgaatgtggtgttcaatgtaaagtaatttcttctacaggatgtactatgagttaacattttaagtagaagtagaacattaattcttacaaaataaattggatgttgatcttcttattataactggagtgcaaccttatctgtgtgctactcccgcgccgcctcttcccccaccgcatctgctgccgccgctgccttccccggtcgttccaagccatggcatcgacggcctccctcaacgccaagtcgcatcaatgccagtgctcgtttcttgaggtgagcgcattccttctcgttcttaattgaaccgaaaataggcatcaagatatataagttgctgcactaatctgcaagtttctgtcagaaaacatagcaatgcatttagagcttgattttagttagcaacttagcattatatgtgaaaatgcatttagagcttgagtttaattagcaacttagcattatatgtgaaaaaaattagcagttatataagatatatgattgtaaaaactacagcggctgccggtagggatttttggtggtaagtattgatttgacaattttggatttttggggctgatttttagtaattagattcaggttttaccaaattattcaggtctcctacatcactgctcactcctatgcatcctatgcggctgttgctactgtctgccaagatgagttgaatcatctcgctgcacttggtggtgatgatgctatcagatgctatctccatattttaatgtatgatactgttgactttttatccaacgtttgactattcgtcttattcaaaaaatttatgtaattatcatttattttattgtaacttgatttatcattaaacatttttttaagcatgacataaatattttcatatttgcacaaaatttttgaataaaacgaatagtcaaacgttcgtcaaaaaagtcaataacgtcatacattaaaatacggagggagtacatgccatggaccaccgttgtttcttgaaatcttcgttaattatatcagggtatccagagcaaagcacggttgaggtaaatacaatttcttggatcacagtttatctgaacaattaaccactcttgatgtacatgtcacatgttgaaaaggtttccagtgcgtattctgaacttatgttagcaaaaaagctactattttgccaccaccattttgatttatgtttagatagttaaactctgatatcatcatcctagagatgtacttgaggtgagcacttgccatctcgttcttaattgaacttaaaatatgcatcaagatgtgtacttgcagataacgatgccttagctgcacaaatatgcaagtttccttcagaaaacatacaagggcatttggagcttgaatttagtttgatatacgaaaaaatgttagcagttatctaagcttgaatttggtttttcttagttacgacagaagatgaacatagaaagatttgcatcgtcctaatatttgtttactactttactgcttccacctggtctattgcgttgtactagtaattaattttttcgaactctgacatagtgcagtgagaatgactctaaagaagcaaatgaagtaatagtaataggggaacttcttttgcgcatcaggaattagaagcaaatgaagtaatagatagacaacctcctgaggtagtgcgtaaaaatataaggtgtatataggtccttgctgtgccgttgaattcaacaactttttgttgtacgtgtaactaccacgtgaaaactacaatgatatgaagattataaagatgtgatgcaattatcgtttgtgcttcaaggttttcgttatagcagatttatattgaattattattttatatcacattatccagtgattcaaattgatgtacaatttttcccgttgcaacgcacggacgtccagctagtagtgactaactgtcgttcagataagaattgcatcatcatgaaagaaatagtatacagagctttcgaatgcagagcttttaatcgaaagctaaccgataagtctgcatcctgcaaaaacaggatgattaacagaagagaggtttattgaacaaatcctaagcagtggagtactccctccatcctataaaaaaccaacctaatactgaatgtgacatatactagtactacgaatctgaacatatctttgtccaaatttattataatagaatgttacatacagtcgtagattcaattttttcagtgggacagagggagtactctgctagtcagagtaggaggtttattgaacaaatcctaagcagtggagtactccctccgtctaaaaaaaaagacaaaccctgggtttccatgtccaatgtttgactgtccgtcttaaatgaaaattttttataattagtattttcattgttgttagatgataaaacatgattaatactttatgcatgacttgtctttttaatttttttcataactagcaatagtgcccgtgcgttgcaacgggaaaaacaccgtttgataatgtgacactttgaaaacctcaaatctgtaaaaatcaagtctaatttgatatattaacaaataggtagaaccgagtctaatttgatcaattagcataggatttaggatttagttttagatttatttttcgagcctacttaggagtttatctgacggactttaatttgaaaaatgtaagccacattgtttgatcaaatttgcttttggcctaggtcttcccaagccggtccaaacttgggctggcccatctttagcgagttgagtcaattcaacggcccgcaagctgagcagctaagtgcggcccacatatgcgggggcggtccgatgcacttccgcggcccattgggcgcagcgtaatcaacggcagcgacggcccgtcgctgggcgaatctgagccgtccgatctaatggacggctccaatcgtccccgcgccggatgaagcgccgactggggagaggggcaaaaccctagctcccaaatccctctctcctgatcccatttccctccggcgacgagcgagcggaacgacggctgtccggcaagttggtgcgcgcgtgcagtgacgaccgccgagcggctcctgcttcgctggctgggggagcgcacccgagggcggcgcaaaaccgtgccacgatgtcggcggtccggctaggtgggcgtgcaaacggcgacgagcgccaagtggcttggacctcgtcggcggtaggagcgacgccaagccgacgcttcccgtcttcggcaaaggatggtggacgggtgctctaggacagtgcgcgtgcagggaacccggcacgactgcgaggaggtgaaggtgcggtggtgccgcttcctgaaaagctccggtgagctcaggggcttcaaatccggtaagtaacccgaacccttagcttaattgatttggatttgactcctatggttcttacccaaaattagagttcttcgaatttagagaattttatcgggaaatttcaatctattttattctctcttttcgagttagggaagtttcaatatcgtttatcctcttttaattttggaaacttcaatctagtttatccctttgctcaatttcattttttttttttgctttggctggcgtttcattgtgcgggcagggacggagggcgccgctcgtcccctcggaaagattaagattaagataagataggattttcacggacgacggaagtaaattgaatcgaactttcttttatttgttttaatgtttttttcgccctttttttgttattacgaacaacggaaacgtttttaattttttaagtagtagagatagagaagatagatatatatagtaccgtgtcaaatataataggattcgacttttttttaccgcgtcacatgtaattctttttttttttggatcggacagatttgttttttatttttttcgctctttttttaccgcgtccacgcggataagtttttttgccggtctttttttcacctggttttttttatgcctgtttttttaggaatcggacatattccttttttatttcttttcgcccttttttttaccgcggaatcggattcgtttttcttttcccttttttccctttttttatcggacagatttggtttttctttttttttcgcctggtttttttcgctcgttttgttttggatcggacaggtttttttcacctggtttttttaacggacgatggaagcacctcttattgtagtatagatagagaagagatagggattttttcaaataagacggacggtccacgttagacacgaaatttttaagtagtagagatagagaagagatagagattttttcaaataagacggacggtcaaacgttggacacggaaaactagagtttgtctttttttattattattttggatggagggagtactctgctagtcagagtacagatgtgggtatgtagcgttcaccaaaactataacgttgcgacttatgcctgatgatgcgaagctcgtcgtcgtggccgcgcaccacctcgacgccggtgagcacggcgaaattcctttcatccgactcgaaatcgcagcagtattcggtgcaggtcccccggcgagagaccgtgtacagcttggcgacgcacagcttgctgtcgcctaggtggatgacgtgcgacgaatacacctcggtgaattcgccgaggtcgatggcgtgcgacgggcgcgccctgcgacgcgacggccctggcacggcgaattccctgcacccggggtgcgccggcggcggcggctccggctgctggacggtggaggaggacaggtcccacgcgccgaggacgccgtcgtccgcggcggagaggccgaaccagagaccgtgctcggggacgaactcggcgtggtcgctgaagggcagcgtccagtcgccggccttgctccaggtggctctcgccgtgtcgaaggagtaggtgccatgcctcatcgacgacagcaagatgtgcgagttgccgaccgccgcgtacgcgcaggtgtcgccgacgacgtgtttgtagtccgcggcgtgcacgtacggtggcggcggcatggggcgccagaggcaatcgtccaactcgggcttcttacaacggacgagcgcctcgaaagaacgctcggtgacgccgtcggggtgaggtgacaccgccatgacgtacagatccttgccgacggcgagcgacagtgtccagagcttgggcgtgaccatggtgggcaacgcgccgacgctgtgcttggcggggtcgtagatgattgtgcggccagcctggtcgacggcgattatcttgtcgtcattcctgcgcataatctccatccacgtgatgttgtccgtccccgaattgctgctgccggggggaaagaagttgatgtcggttggaggcaggcgcacgtcctccacggccgccggcgacgccgccgccgccgcccggtctgcatagaagagacttgatgggtcgattcggcgtagcctctggaaggaagagtctacagcccggaaatcaaccatgtagaggaatcgccggtttttcgtcttcttcactttcttctcttccaagatgccggagcgattattgggatttgtccccaatctgctaatggggttaacatttgctaacgaggaggttggggttgagtagatgcggtcggcgagcgcggcggcgcgacggcagctactggcacctaggcgatacatgttgtggatggatctggaggagaaagatgagctagcgggtgtggcggcggcgcaggggatttggaagagaagcgcaaggggatgtctcgccgtcgtcgacctgtggtggagaaggaacggatctatggtttttctctttttctttcttacgaatttttttcgtttttagatttttttttaatatttacagaaataatctatcgaccaaaaaaattgcagaaatagcctctgccgccctaatgatgggcggcaagctgacgtggcagacggtgggtcgaccgcgccgtctgccgccgtcggccaaaattgcgggctaattgccattttggccgcccataaagagcttgcggccgtacttttttcatctgggtcccttgccgccctctatgccgcggcggcaagggacccaaatgaaaaagtacggccaaaagatttttctatgttatgttaataataaataaagaagtatttattggtaaaacttgttaatattgttataaaaatgtattgaagttggttgttgcgcaatttcatatgttaagtgaggtattattttgtaccttattcgacgtattagtactcggataatttatataggcctatcgcagtctgggtcatagaaacattatatggacttaaacaaggagaattatgtaacatgaagaaatagtagtacaatttgaatatgatacaactatttgcattgcggttacatagatgatattagattcgaactaggagggaggtagtgcaatagttgaacacaacaacgatgtagtaatgggacaaggaagcatgacagtagaaatttcaatatgccaagttgtccgataatagctaacccctacgtgaggatccctctcctctctcaaaccgcgctttagtaaccctgtattgctctggtagtttaagctgcacaacacggctaggtggagttagaatccttctggtgtctatccattctctgtattaacatctccttggtggttcctgggaggaaagaatagatgtaaagcaagcaaagttagtaaatgttgtgagaaaataaggattcatgtaatcaaaatattcttaccatgaaatcgtcgtcaagaatatttggacaaacaaagaaccttcgacccaatgttgtaggatttatggaacgaagaacctgacaacgatcaccacacctgcatcttggacgggcttcccatggagggagtgccgtagttagcacccgccagtcgctctgttgttcacgacattgtcgttcataagtcgcttttctctgtaagtattgctcagtactttcggatgcgaaataccagcgaccttcttataaacaagtggttaggtcgagaacgggattttctgtatcgacccactcgatgtatgcgcaagccgtagtgcgggtctgccgaatagagtagtgttacgaagaataaagcgattgcccatacggaatgaataagcatatgcagataataaaatacctcacggtcatagttagggcacctaaaaaagcgccttcctcgaatatcaggattcctcgaagccattagttggcatcgatcaccgcataggcagagaggacgctggcaccaaggtggtagtaggtatacacaaggatcgctacgctagtttggatcctcaacacctcggcgtctagccattgacgaaagccggtcggatttgtaatgaagcaagtggggaagagagtactgaatgtgactgagttttgaaagattgtgaggcctcacacgttaaggcgacttatataggcgcaaaaaatcgagtgatacccctgacatgtgaacgtggtggggtatggtgggtatgcctgattggcgccgaaagatacatgcatgatcggcgccgaaagttacattggtcgtatgcgccaaatggcgggcaaatactcgtatcacacgcgaataaaggaggctgcatcggtgcggcagaaagtagtcgtgcatgcgccgaaaggtatcgtgcatgcgccgaaaggtatcgtgcacatataacaacaacgtagtcattacacaagcatacagtactggaaagtgaagcaagtaaacaaagagaagactgctctactggccctgccccgcaccacgaccacgcctggtcctccgggcctgtgctcgcacgtggtcctgggagtaggtgaaacgatccggtggcacagcacgggtagcacgagtgtcccgcggaggagtggcctgcgcatggtcctgcgtctgcaccggcggtgcgcctcccagctgtgaggggccgatgacgtcctttgtcgaacctgaagcgaagtcgaagtcagtgatgtcgaagaggaaggtggaaggcaacaagtggtccgacgaggtcccagcatggtccagtggtggaccctgactcgacgtgccggctgcctgtgacgaagtcccggtgtactgccagaactgcgctgagtgcgaggttgacacagctgcctgagacgctgaccctgcagcctgggagaagtgggcggcctgcgtcatagcgaactgggcgaaacctacacatcgacaacgggacccttgtaagctaagacataaaatgtatgtaaattgattgtcgaagtaatgttgtttttttaagtacctgtggggggcacaacagaaggcctagccgaggaaggcggggtgctgaacggtgcacgaaaccctgaagcaatcgacaagtgaaacggctcacttatatgtgcgaggcatgtacagaaatagtaataaaaatacttacctccgtgcggagggggagtcggcctaggaacgtgcgcagctggacggggaccagtcggtacgggtggccgctgtacagctgcgtctgcccgagcaacgtcgtctgcacgacaggtgagaactcggagaatcgagcgcatcgactccaccatccgcgtatacgtcgtcaggtgctcctctacgggtaccgaaatccccgcgcctaaacgttggatcgtcgttgaaccgtcaacgacgatcccggttgatgtcgtcgacctgcatggttaatttgttcgtaaatattcgtaaaatttgacgaagagaaagacatgaaaacataaaggaatggtgcgatgcagggtactcacaacatgagcgaagtcctggtcgcggtgcctggcatagaggtctctagtgctcgcaacgtggggctgctgctccaagggagcgaaggtgaccctagtacaggtgcgtggctggtaccagcgtaggtaggcctggtacgactcctcagtgtgtggctctccctcgtggtccacgacctcctcggttgcgagcaaccagtcctcaacaaaagtcgccaacttggcgggccagtcgccagctgagtgttgacccttgcgcgagtacctgcgaattaatgtttaatattagtgtgaaacgacagatgttacaaattattgtgaacaggcagattttaatgcaacaacggaaagcgtagtgcaagaagcaaccggtgaacagcagctgggacggtggtcggaaacggtactggaaagggctgacggaagccgaactgccgcatcacgcggaaaggggcgtgaggctcaacgcagatgtcgaagaccatcggaaccgtagtcatccagtacgcctggtccctggtgcagagtgtggacagacccaacggcgcacgagcctgggtagccatggcactgtagggctcccacacgacgtcagtcggcagaaggcggtcgaactccataacaaactcaggatacgaccgcctaacctggacgtgggcccatcggcgctgcaatacgagacgatcgatgtgatgtacaatgaacttagcaattaacttaacaatacgataagatcgatgcaacgtacctgacgacggcaccacagagtacccatcgtagggtagtcgacctctggtcgctcctcgtacagtgactcctcgtacgtgtgctggtccacctcagggcggccgatcgcaatcctctcagctgcccagatagaaagaaagagagggcacccaccaaaggtcgcgttgggatccgtcttcgtgcaagactcacaaagtgcacggtacagagccgccaacaacgtggaaccccagctccactgaggcacctcgcctaccgcggcgtcggcgatgctcctggcgtagtgcacgagtcccttgtcgaccgcgtgcccgtgaccgccacagaacatcacccagccaaaaagccagagcaagtacgcctccaaacatcggctgtaggagtactcgtcggcctcggcctgtagctgctcaacctgcaagccgtcgataaaatgttaggcaccttaactgcggactaaatatgtaatacgattgtcatttcggtacaaaaacactcacggtgaactgaagcagccacctcttcgtaggtccggtgttgcggtggtgtgccaacggctcgagcgggaggtacggtgcgcgctgtactagtgcgaaacatgccgtcagatcgtcctgccagtccacagccgtggtcactggcccaacagcgtctcccgcgagcggtagccccaacaagtacgatacgtcctgtagggtatgggctacctcaccgcacgacaagtgaaaagtgtgcgtctttggcctccatcgatcgaccaaagctgctaggagggacctgtccacagtccatcgtctggccgggtccgcgtcgccggccgcagcctccaccagccgacacatcggtaggaggccggcctcacgtagcctgcaataacaaattaatatgtcattataaaaaatattacagtgcaactaacttatagtaaaacactgttcgtacctctcgacaaaggagtggtgaaccgtgagtagctcactgcacgtccgtgcccggaacgtcccaagctgagccccctgcaccgcagtaaggtgagaccggtgtcggtgatctatcgccgggtccaacaactgaggtgtatcctgacgtgccatctctgaaaaatatagtgtttcgtgttagaacaattcaaaaaatagtaatgtaaaacaaaagataacttgcaaaattatgaaatagtaataaaatcatgagattaattatgtacaacaagagtacaggctatttaaatatagcaaacgttactaatggtacataacgatgacgtgcaatttaacatatatgtagagttcaataatataatataacattacgtgtcgaagtccgacatacatcagcatacctaaagacgttaggcgccttagtccgacgttacatcacgagacctaaagacatgacatgccgaagtctgacattacacgacgaaacataaacacatcgataagttcgaaacgaattacaagcaaatccacatgccgacatagaacataagaactacaccacgtagccagacgtggcacgacgacgcctaggacgtggtcgagtggaggtagtgccttcacccgtagggcgagctccatctgctgctgatcctgatagtcctgcctccgctgcacttggtttctccttgtctttaggacaatgcttgtaggtgtgcccatgttcatcgcatttgctgcaacgcttcaccctgccagcctccgactcgtccatatcgttgcggatgcgacgagtcctcctccttccagccttgcctcggagcttcgatgggtcaggaatattgagtacttcatcgttagtctctgtgaactccccagctatgccgaacccataaatctcgccgctccatgtatgatatattgcttgcttactgaagtactgtgacacatatactgcatctggtatgccacactccgctgcggcagcaatgacatgggtgcatggcctgtggagcagcttcggctttgcacaagagcaatggcatgtgccgtcggctttgagaacacactcctgcttcactctcttgcggtagatacccctgcctgccttatcttgacatagtatctcaaacctgtgctgttgggtaccttgcactagagctcgatgtttcatggcctttttacgcaactcctctagctttttctgcatgaaagctccaaacaaaatgctgttgttcggcatagagggaagaactgcctggaaccgatccctaaaatacctgcatgtcccatgtaaaatgaactccactatgccaactagtggcagtccacggacaccgcgcatcacccagttgtaaacttctgccaaatttgttgtcattattccatatctagcaccacctgtgtcatacgccttggcccatttctcttttggttcatgcagaatccactgagaaaatttccgaatctccaatccagttcttctaaccaatgttggactatccgttgggagaggtccaagagcttgaggagggtcagcaacggcggtcgatggagccgttgcacgctgatcactgcatttggctgtcaactcatctaatctcttccaaagctcattgaattttttctcctggttctgattgcacagcctcttgaacatgttcatgagctccttgttcttgaattgcttgaagaaattagctcccatatgacgcatgcaccacctactctgtacatcttcccaaacaccggggtatcctcgttccatactcccaaactgcaactctcctatcgctcgcagaatgccagcgtgcctatcatgtatcaggcatacatttggcctcataccaacaacttttgttttaaccaatttcaggaaccagtaccagctgtcggtattctcactctcaacaaaagcaaatgccaagggcaatacctgattgttcccatctacccctattgctgttagtatctggccccgatactttcctgtcaagaatgtcccatcaatgcagagaacaggacgacagttcacgaatgccatcttgcatgcatgtagagctaagaacgccctttgcagcacactcttgccaagatgttcaattgaggggaatttcttcacttcgtaagagctcccagggtttctttcctcgataacaccaagcaggcgtggcaaattgtcatacgaggcttcgcaagttccaaatctcatctctattattttgtttggccctccaggccttggcatagctaatagtatatttgtatgtctcttcaatgtgtcggattattgaccttggttcatatgtgagattatcgatgacatgcacatacatctcagatgcaacaaatgcacatgtaatgttcctgtggtatttctgaacaccaggtagaaaacatgtatgcttcgtaacaactgacactgtccaataatccttccatttccccttatacgcgtgcactctccagggacaaccatctttttccttaacacaccgaacttcatattgcgaccggttcgacttggcaacccaaaactctctatgaagtgacactgcaaaatgttttaccgcctccttcatatcttctgctctactataaatcgctccctgaataacctcattttctttgtactcccatctcacactatcctcttcagagacgatcagcccagaaaaatcctcactagcccattctgctggattaatatccgtcttatcatctgacgaatcaccttcctctacacgctcgttgtcagaatcctccctctccatttcatccacaatggcaccgacagtctccccctcgtcagccactccacctggttgaatgcccactggagctactacgcccccgtcctctcgtgcgttgacctcctccacagaagtctcgtttacttcagcacttggtccctcgccatcatccatgttcatctgaataatccttccatttccccttatacgcgtgcactctccagggacaaccatctttttccttaacacaccgaacttcatattgcgaccggttcgacttggcaacccaaaactctctatgaagtgacactgcaaaatgttttaccgcctccttcatatcttctgctctactataaatcgctccctgaataacctcattttctttgtactcccatctcacactatcctcttcagagacgatcagcccagaaaaatcctcactagcccattctgctggattaatatccgtcttatcatctgacgaatcaccttcctctacacgctcgttgtcagaatcctccctctccatttcatccacaatggcaccgacagtctccccctcgtcagccactccacctggttgaatgcccactggagctactacgcccccgtcctctcgtgcgttgacctcctccacagaagtctcgtttacttcagcacttggtccctcgccatcatccatgttcatctgcacacctggatccttcgggtgaacaaacggaaccaaagctagaggccacccgcgttgcaatgcattttccaaataccatctccacactcgagagttttgaactggcattagttcccaataaaaaccctcagttgcccgacttactataacattgactgttatgtcacttgtctgtggatcaactctcaagcccctcattaaccatccttttatagaaggtacactcctctcagccggtctctcaattcccctttctaatacaataaaatttgacagatctaccccagttggcccgtaacggacgtttcctggtccatggtaaacttggaatatttgtttgttcgacatatctgtcaacgaaataactagatcatattactctttcatgcaataaacatctacaacgtaatatcttcttgtgtaagccaatgcaacggtaatgtattaattccaaactagcagatctacgtagttaccgatatctacaatacgcacttctagattagtacaactaaaaccctaaaaatataatgcatttattcaaacaaatttttaaagaatacacactatttaactcaatagtcacatataggatctatgaatattacctgaaatcggcgtctgaatccggcagggcttcgccccttcttctcttctcctcccctctcttcttttttttttcactggaattgaggagagaagaatgagggctgagggctgggcagcaggccttttataggcagcgaggcctgccgcccggccagagggcggcaaggggccgcctgcaaaatagccggccccgactggcttttttgcattcgggccccttgccgccccaccagagggcggcaagggttttcctgcaaaaaaccctccctccgtcaccgcccgttcctcccccgtttgccacgtcagcttgccgccccagaggtgggcggcaggggctatttctgcaatttttttggtcgatagattatttctgtaaatattaaaaaaaatctaaaaccgaaaaaaattctctttcttacagccgctatagttgggccacagcccacggcccatggctcagcgaaccggatgcgggttggaactttggaagccaccgccgtcggaagggcacgggcacgagacgaatttttttcatttttcattttttattttttaatatttacagaaatattgtactggtaaaaatatttacagaagttgagagacgtgagggacggacaagttgaaaaaaaaaagaaaaatgcatttttggcagggtaaaaattacatttacccccatgcagctcttgtagagggtggtaagggatatcagtgcaaaatacgcacaccttgccgctctccacttgggcagcaggggtcatctgtgtaaactagcaaaatgtccgtgcgttgcacaagataatggctaggtttataaagtttgacctcgatgattcatcgaagcacctaaagtatgttctgcttgcgtcggcgcctctccgactcccttgcgcagtgggccggtgccaatccctcccccctcgtggcggctggcacagatcgatctcctttcctgtccttcgtttcctctctttgctccctactccctctcagccatagcgacggtggccgcggcaataatggccaaggcagccacagcgacagcggccgtggcggcgatggccaaggcggccatagcggtgacggctccgcagcagctaagacggccaaggcgcgcgggcggcgacgacgctggtgggcgatggatccggtgttgggaggcgcgtgggtgacggcgaggctagggggcggtgggggaggttcgagggtagtggcgagcatggtgggtggtggatccggcgttgggaagcatgccagcggcggtgaggcagtgggcagccgatccggctgctaagttcaaggcttctagtggccgacttccgagcataatccctctgcctcctgaagctgtcaccgccgcctgcttcctcgacatccctgccaaatcggagcccggttgcctcctcactaaagcgctgagcttccaccgtccgccgaagccgtgcactcccgcttggagctcacaactgcaagtcaaagtcacctccgcaaaatcaggttagatccgattgatttttgtagcaatcccgtggaagtatttatggggttggttttatctgttcgagtccaaatcgaatatgcattggattagagttctcctgtggatctcttttctgattctatttgggtggattagagtctgatttgaattcacaagttctccttttagttagaatttcaatttcgaattgggaatttgaaattttggaacaacctagctgtgggaattttgttttttccttgtggtgtgtgcatccgattttgttgcgctgattttgggaagtgtttccatgtatccgattctgatgatttagtgatttttctaaggtgcactgagggatgaaagcggcctttcccgcaaatcggaaatcgaatgcactcgtacggatagatgaaaaattagtgcgatgacggacgaaaacacggacaaaaacacaccaattaaaatatttttatataattattttttattttagttaaactttattttataatttaatgaggaggatttctttgtattttagccatgctcttattatattgggttaattggatccatgccactacaactttgccaaattaagaaaaaaaaatgcaactactattcgtcatatctgctgtatgccactggaaattttaatttgccaaagttgcagtggtatgatccaattaaccctataatattttagtccttatattttctcaattattatttttctcaaaatagtaattattatattttagtaaccttagataaaaataatataattgcaaatgcaactttgttggcccatttctcagcctctctacattgtctgcattattttccacttaattgttccctctctctcctcattagtttttcccctttctttcccacttccaccgacgagcgaacgagttctccagggacctcatcatctgcttgcggggagaattttcagaatataacactcaatacacactgctttcaatatttgtcactcaattcacactactttcagaatacaccactagagtgtgaattttcttcgttccgtgacactccgtcatcccaaaaccgcgcgtcgtcagttcattcctctcgccccgtttgccctcaccgccggcgagctcgtcctcccccacgccggcgagcttgtcctccccacaccagcgcctgcgctgctgggcgggaccatccacacggtcgccggtgacatcgcctgcttgccgccgtgccggatattgagatcgagccgccactgttggcttggaggagggggtcggcgacgatgggggtagcgcggggggaggagccgtggccagcgcctccaccgggccgccgacagccgcgcgcgtcggctgtagcttgcggcgccgcttcgcggtgggctcgtcgccgcgggcagccgccgcgacggcggagggcgactcgatggggatgcggaggacgccgtcgacggtggcttggaggaggtcagccgccggagctcgaccaccggagcgacggcggctcggttcgctcgtgtcatccccgagctcagccgccgtcgccagtccaacctccgccaccgcggcctcgagctggtatagagctcagtcgccggagctcgacgccgacgggcggcggtggggctgacgcgggcgacggaggggctgacgcgggcggcggcgcggctaacacgggcgcgagcggtggctgactgatgacggcgacgtcgggaggatggagaacgacggcgcgactgacggtaggggatggaatagcacggaacaaagaaaatttgcactctagtgttgtattttgaaagtagtgcgaattaggtgacaaatcctgaaagcagtgcgtattgggtgttatattctgaaaattctcgcttgcgggggttggaccctggagcctggagtcgaagagcttgccgccggtagaatccatggtgcggattcgcgccagcgtggaccggccaggtccgtggccgcgcagatcgagcttgcatgggctggctagctccctggtaggtccctgtcctcctctcctcgctctgctctctcttcctccatcccggcatggattgggcgcaggtgacgcggatcaacgcagccgctcccggccagcatcaacctcacttgaaagaagcagagcgattttccaccttggctggatcagatactatttgtcttcgattctgtgagtttatatttgattttctgtcttttcttcaactcgattttgttaaagtatatctctgtgtaatccgtgtgctttggattaggatggccggtggattaagctatagattagcttaggttgttgtgatcacatgtaataaggatccggccgttctatccatagcgcatgcctatttgtatcttctccatcgccgttttgtgcgataggttaacacgcatcgtcgacccgagtgcaaaggacgacgttcccatccatcctgttttcccacatggtatcagagcgctgaagttagatcccatctaccatggctagctcctcctcttccacctccacaaattccttgttctgcttcaatgtttctgagaagttgagcaagcaaaattatcagctgtggtgcgcacaagtgctgactgcgattcgtggggcacgcctcaaggggcatctgaaaggcaagaccgtcactcccgccgcccacatcgaagcagaaaagaaagaagatgacaagacgaagatcaagatcatgatcgacaacccagcgtacgaaagagtggtttgccgcggatcaacaggttctcggcttcctcttttcatcgctgtcacggaatatattatcccaggttgccacggcgaccacagcgacagatgcctggaagatgatccaggagatgttcaactccagggcgactcgcgcgcgctccctcaacgtgctgctatctctcaccagcactaggaagggaacccagaccatctcagagtacttcgccaagatgaaggccttagcagatgaactagcgatgtcagggaagcaagtcgatgccgaagaactcactgcttttatcttaaatggtttagatgatgattatgattctgttgtatcggctttagcggccaaaactaaacctattactctatcagaaacatatgcccagctattgaactttgagaacaggcttaatctacgacgagaaggcaacatgacggccaatgtagccgggcgcggccgtggcaacgctccgagcaaccggggtggtgccggccgtggacgtggtggtcgcggcggcttcaatggtgctggcacaaacgccggctgtggaggacgtggcgctggacagcagcagcgctccggcaacgacacacgacccgtgtgtctggtgtgctacaagcggggacatgttgcagcagattgctggcataggtatgatgattcttatgtgccagatgagcgacaccttgctgcagcagcctcctacgcctattttttttagataagtcaccggaggggagaggttccccacctgaattgcattaaataaatagagtaagggttacaactgagtttacatgacatgaagagattgcaagggggaggagaagatccctttccaaattgaaactacaactctatcaggaggcttaagacgttcagaccagagagaacattcgtccacacatttcctaattgctgccggaactgaagcatccaggttgcggaaaacaacgtcgtgtctgtggttccatagtgcccataagcagagaagatagaagacatggtggtgcagctcgggcaggtttccattggggcgcagacgtccgagttgacgaacatcctgaataagcgggtcaatgccgatcgtcgtccagaattgctgggcaaaggggcaaaggaagcagatgtgacttgcaatttcagatgcagctccacaaatggagtcgactccaatcggtacatggtctcaggcgccacggaccacatcaccggtgaactggacaagctcacggttagcgacaagtacaaggcgaacgatcaagtgcacactgccaatggagcaggtatgaaaatcgagcacattggtcgctctatattgcaaacccctatgcgcaatcttatcctcaaaaatgttttacatgttccacatgccaccaaaaatttagtttatgcatcaaaacttgcctccgataatgctatatttgttgaacttcatggaaaacattttttggtcaaggatcaggctacgagggcaacaatgcttgagggacggcgatacaagggactctacccgcttcctccttcatctcctgcatcctctccaaaggctgtttacggtgtggcgccatcttttgcaagatggcatagtcggctaggtcatccttcaagtcctatagcgtctaaagttattagcacaaataatctaccttgtcatgacaaggctagtaaagagtctgtgtgtgatgtgtgtcagatggccaagagtcatcaacttccttacaatagatctactagtgtttctcaatttcctttggaactcatttcctcagatgtctacggacctgctcctatttctgttggtagacataaatattatgtgagttttgtggatgattatagtaagtttacctgggtttaccttcttaaagcaaaatcagattttttcaggtcttccatgaattccaagctcttgttcagagaatgtttggccggaaaattatcactatgcaaaccgattggggtggagaatgtgagaaactccattctttctttcggcaaataggcatctctcatcatgtatcctgtctgcatactcaccagcagaacagggcagtagaacgtaaacaccgtcatatagtagaagtaggtctatctcttctagctcatgcatctatgccactaaaatattgggatgaatccgttttagcagccgcatatattattaaccgagttcctagcaaggttatttcctttgaaacaccccttgaacgcctgttccatcaaaaacctgattattctgctcttagaatctttgggtgtgcctgctggctgcatttgcgcccctacaacaatcacaaactccaattgcggtccaagcaatgtgtgttccttggttacagccagcttcataaatggtttaagtgccttgatgttgctttctgggagagtttatgtttcgcaggacgtgatctttgttgaaatggtcttcccattttctcaattaaaatcaaatgcaggcgcccgcctaagagcagaaatagctttgcttccatctgaccttgtagcgcatgatcaagggggcgagcaacagagtgatcatgttcttgattttcctaatactgctaatgaattttctggtagcaattcagatgattcgggtacagatgaaggtgtggacctagcatcaccaacaccggcgtttgaagcgcatggcgcaggagaaatcgcttctggatcggagcctaacgcgacacggcagacagcacagacactggcccagcagacgcacggcgcggctgctccactccactcaggcggcgacacgtcgctgtttactttaccaagtccggcgccgcaccagaccacttctgtgccgagccatgatgagaccggtacgagagctgacactaagcatgtgtttggttgggaggatatcccgggatgggatgggatcgtcccatttttaggtctgtttagttgaaggacaaggagggataggatggttccaaaagggaatattccttcaatattcgggacaaccccatctgggataaactggcggacaaaacgatcccaccccatgcccgtgactcgcgactcacgcgcggtaagaccgaaagtttcgcttcacctcttttttccccttcgttcttatctcttcccgttcttatcgcttccttcctagggttagcaacacacgggtggcggcggcgcgagcgtgggctggggccagccggtgcgcatgcaggggcgaggcggcgcggcacgcccggggtctctcgtcagcgcgtaggggcaaggcggcgacggcgcgcgcgggggcgaggcggcagcggcgctagcgggagctcgaggcggtgcgcgagcaaagggtcggcgagcaggggcaaggcggcagcggcacacgcagaggcgaggcggcggcggcgctagcaggagttcgagctggcgacgctcgagccggcgcgcgagcagtggcgcggcggctctcgaggaagggcgacgcggcgcacgagtagggccgttcgtagcctccaactgcacatcggggttcccattcaccacggtaaaaagaccctaaaccttggatgaggatttcgttttcagatatgtgcatatatgtttttgttcaagaatgtgtgaaatcaattgctgctgttcaagatctgtgcatatatcaatcgctgttgtaaatttcttgacagtagatgatggccatgtgtttttttggttgttgtattgtagatggacaagaggaccaaggttttagtttgtattgctgctacaaatttattgttgtcgatgatggccatgattattaggtctagaaaaagaaagagatgttcaaggagataaggtattagatatggcccattggttgaaagggataggaaaagaattgactacctagaaacaaaaatttggtggaacgatacaacttgtatcaacatgtttagacttagaagggcaagtttctttcgtttctgtaagctttttagggatcgtggtttacttgaagatgccatccacatgtgtattgaggaacaagtggctatgtttttgcatacagtgggacataaccttagaaatagattagttcgcactagttttcataggtctggagaaacagttagccgttatttcaacaaagtccttcatgcaatcggtgaggtacgagatgaactaatcaggcccccctcattggacactccaactaaaatagcaggaaaccctagaagagatccttactttaaggtctgagattcatccctatctaaatttatctttatgtgaacattgatatatggtccctaatttttaatgttgttgaacacaaaataggattgtattggagctatttgatggcacacatattagagtctcggttcgtaagaacgtggagtcttcttttcgtggtaggaagtcccatgccactcaaaatgtaatggcagccgtagattttgatcttcggtttacttatgtcttggctggttgggaggggacagcacatcatgctgtagttttaagagatgctttggaacgtgaaaatggcctccgtgtcccacaaggtaatagattactatagtttatcaaattatccatgacaaatgttgatatttaggaatgtgaccaacttgtccatcatataataggcaaatactatctagttgatgctggatatggagccaaacaaggattcttgcctccttttcgtgctgtccggtaccacctgaatgaatgggggaataatccggtacaaaatgagaaggagttgttcaaccttagacactcatccctctgtgtgatggttgaacgtgcatttgggtcactaaagaggaggttcaaagtgcttcaaagtgcttgatgatgccactccattcttcccatttcgaactcaagtagatattgttgtagcttgttgtattattcataactgggtcgtaaatgacggaattgatgagcttatagcttcgtctgattggtcaagtgaggacattgatgaatcaaccggccaagcgaatgaccatgcattgatggttcaattcaggcagggcttagctaatcagatgtgggctgaccgtaatagccatcatggaatgtaatatgtagctgggctacttgtatttctaccttatttactatatttcattagtattcaatgaacatttttatgtatttcatttgtatggacagcttgttgtactccatttgctaaatttcatttgtacggataaatttattgttgtatgctgaatttatggtttgatgaatgctgaatttatgggttgatgtattgctgaatggtgaatttctgggttgatgtattgctatatactgaatttctgggttcaaagtatttgctaaatggtgaatttatgggttaacatattgctgaatgtttaatttctgggttaatatgctgcttaatggacaatttctgtttactatattgctgaatgatcaatttctggttcatttgacagaaggtaggacatggacaacactagtggcaaaggaggaagcacccatgcttcatggacctcagctatgtcatctttcatgctgaaactccttgctaatcttgtggccggtggcacaaggacctcatctgacttcaaggcagtgcatctcaacacatgtgctagggctatgaatgaaaggttcaacagtactctcacgggtgagcaaattaagaatcatttgaagacatggcaaagaaagtttacaaagataaataggcttaggaaagtgagtgctgctggttgggatgagaaaattttcatcattactcttgatgatgagcactacaatggctatattgaggtaaatgtcttgactcttgacctagtggtttattccattcatatttttattgcaattacttaaacaaaaattttgtttcactgaatgatcacaaggctgatgctgattattttaacaaacctcttgcgtactatggtgagatgcttacaatatttcgtagcaccatggctacaggaaagtatgcaaaagactcaagttcagtcctaggaacagaagatgtccaaactgaaaatgatgaagaggaaaatgatggccctgccactactgatgatcgtgcggaggcatcatctgcaagcaagccaaagaaagctagaacacaagaaattgaagatgatgggctgattggtgcattcaccagtgttggtgacaagttagcttctgctaactaaaggtcgctgagccagacaataaactgccagatggtttatttgaaaccttgaaaagccttcctgggtttgaggagatccatgtatctgtttactatgctcatttggttgccaaccctcacattgctagagcttttgacggacttcctttcgaaaagaagatgcattgggtccacttgttcattaatgagaagtttcctagatcaatgtagagttgttggatgagttgggtagttcttttggtattatgtgttgccggtggggccatggtcatgtatgacttgtactgccaatatgtttaaggcagtgaactctctagtaggtgtaagacttaaatttgctattatgtgtaagaccttaatttgctattatgtgcacgacttggaacttcttattatgtttggcttggactctatgtatgggttgaaatgggatcagatgtgagctaattatgtgtgattgttttttgaggggttgattatggaactactagtattgttcatcatttggtagcttgtccaatatgctgaaatcctaaagcttccactgttcttggctgtagtaatgaagctgctggagcttattttcaattatagtgatatgaaaggtattttatttttgtgatatatagtgtggtcatcatgtagaaatattatttcgtagtttgtagactatgagaggtaacttcaccaactaatgtgtggaggtaattgtatccaagaaaacaaaagataggatcattccaacccatcatatccctcaaaccaaataaaaaacaggatccgttccatcccttcaaccaaacaaaaaaacataaccatcccattccaaaaagggtaaaaaaacagggatggaaccaacccatcctatcccatccccaaaccaaacacagcctaatgatgcagccatgcaggacactgagctgagttccgttgtccaatccagtgctgcaggcctagaacaagattacaaggaggcatcaggaaacccaaggtatatatagatggtactgtgcgatactcctgctttacttctgcaggtgagccgagcaatttggaggaagcactaggaaacaaacagtggaaagatgcaatggatgcagagtactcagcattaatgaagaatagaacctggcaccttgttccttatcaagaaggtaaatatcattgattgtaaatgggtatataaggttaaaagaaaggctgatggaagcctagacaggtataaaactagactagtagcaaaaggttttaaacaacggtatggcatagattatgaagatacttttagtcctgttgttaaagctgctactatcaaaactgtcatgtctatagctgtgtccaggggttggagtctacaacaactggatgttcagaatgccttcttgtatggagtgatagaggaggaggtgtacatgagacaacccccagggtatgaaaattcttctaaaccaaactttatttgcaagttggataaagccttgtatggtttaaaacaagcaccaagggcttggtatgcaaggttaagtggaaaattgcaacagttaggctttaagccatctaaagcagatacatctttattctacttcaacaaaggcagtataaccatgtttatcttgatatatgtggatgatattatagttgctagttctactaaggatgcagtgtcagctcttctttgtgatctgaatgaagatttcgcgctgaaagatcttggagagcttcattatttccttggcattgaggttaacaaggtaaacaatggtctaatattgtcacagggcaagtatatatctgatttgttgaagagaacaaatatggttgattgcaaaccggtaaatacacctctgtcaactacagaaaaattgtctttgcatgaaggtgatcaattaggacctaatgatgctactcagtatagaagtatagcaggagctttgcagtatttgactttgactagaccagatatatcctttgctgttaataaggtttgtcaatttcttcagacacctaaaattgttcactgggcagcagtcaaaagaattttgagatatttgaaatacacagcaagtctgggtataaattttgatagatcagtatctacacttgttagtgcctttacagatgcaaattgggctaggtgtcttgatgaccggcggtccactggagggtttgctgtttatcttggctccaatcttgtgtcatggagtgcaaggaaacaagctacagtctccaggtccagtacagaagcagaatataaggctttagcaaatgctacaactgaggtaatgtggattcagacattgttggatgaactcgatgtccatgcaccgagatcagcaaagatttggtgtgacaatattaaagccaagcatttgtctgctaatccagtttttcatgctcgcactaagcatattgaagtggactaccactttgtcagagaacgggttctgaacaagttacttgaggttgaatatatttcttctggagatcaggtagctgatggatttaccaagcctcttggagtgaaacagttagagatgtttagaaacaatctaaacttgagaagttcagattgagggggagtgttagagtatatccctgtgtaatccgtgtgctttggattaggatggccagtagattaagctatagattagctgaggttgttgtgatcacatgtaattaggatccggccgttctatccatagcgcatgcctatatgtatcttctccatcgccgttttgtgcgataggttaacacacatcgtcgacccgagtgcaaagggcgacgttcccatccatcctattttcccacagatttctcttcattttattcttggatccaatttttgttgccataaacttgtttttttgcccaatttatttacaagataggtttagtttgaggaacttttgggttggatctaatgtgttcatgtttccgattcggttggcttctcgagttgaggcggagggcaacgggaaacggaggcttgcaatcgcaatggacaaaagcggattatgacgaacgaaggcataatgtgacgaaaggaaaaatactaatcttttaattaagttaagattaagatatgctaggattctcccctactctcgccccttcttaccgcagagaagccacgtatccgtatcggatacgcgaacggaacgtatcggatatggcccgatacgtatcccgtacgtacctggccgcaatgaagcagagcgtgcaagctacagggtcgtcgctaatgggtgcagcagctagcgctcagcacctccgccgccaggaccagggggtccaggaccaccgccgcccccacatagtgcctccgtctccaggcacaacaattttctttcgttccatgtgtcacatcaagtgctaccatggattttggaactggaacctcaagtgctagtgcggctgctattgacgcttacaaatttatcatgagactaaggacatatttggtagagctccaacttctaaatttagctttagaagttgggtctggagtagagttgtagagctgcctaaacccagctccacatctctagtttattttgtgaaagagctccacccagctctcatcctattttagatggagctgaaactgtttagctgagctctagctaagagagatggagctagaactgaagctatgccaaacataccataatagaacatcaagggcaatcaacatctttgatctggtggtgcttggtggcttgatgctagcatcatgccacatgttagtcgacgttcaattgatattgtaaacatgatgcatcaatttattgatgattcgtatgtgttgatttttctctgatttattggcagctggcaagttaaatcagttcgccaacttgaattatctagagaggagaattggagaagattgataaggaatcggatgcaaagaatgctatgctatggattactccctccgtacttgtaaagaaagtcatttaggatagcgacacggtctccaaacacaactttgacttcttgtttctataaaaatatttattgaaaagtgatatatgtatatttttatgaaagtatttttcaagacaaatctattcatataatttttatattttcaaactcaacaacttgagagttattcatgatttatatacccaaggtttgacttaaacattgtcctaaacgacttcctttacgagtacggagggagtatttccttacaacacttcactatttatatatttttaatctctactattataaaaattggagatgtttttgccggtactttggtacgtcatccgtgcatgagtcggtttttaagttcgttcgcttttagaaatatagatccgtatttaagtcaggttttaaattcgttcgcttttggaatacagaagtagtcgtataagaaatctctttaaaataaactcgcatgttaacttgacatgattttctagaaaaaatatatatccaagcgagttatcacaatgaatttcaatagcctttaccgattgcaacgtacgggtatttttttctagtattatatataagtgtatccctgtgttgacgcttttttgtggccaacacaacattacctaacaatttgcagtgtaaacaatagagtcgccaaaatcaatagatcaaaatcggctagtggaaccgatttcaagattaattcactttcgcggaatcacacgactaatttataaggaaattagcaaagagggtaaatatcagcaaactagcaaaggataatctcctcgctttcgtggtgaagcacgaccgtttttcagcgcaaaacggcaaatattaactaaattctagggttaccagaactcagctatgaaaacaaaatagaaaataataggaaagtaaataacaagaaaatagtagattgatatttttttttgggggggttcctcaaaactaacctaatacactaatatttataggagcacctgaaccctagccgcaccacttgagcgtacatggaaactccaataaattagctaacagaatccgactccatctaaatattaacaaacaaaaaataaatagttcgcatgcaatctaatgccagtcttccagcctgatcactgtcacccttcggtctatgtggcacgggtcccgtgcggcaacagcagcacagctcggcaaattaatcatcaatcaagcactgatccccgtcgcaaatctctcctaggctgcatgcatgtgacaagtccaaaccaaataaattgctgctgcacccagcattatacacagatcatccaagcagggcatcacaaattcctgcacacatatatgtttcaaaactctcgagcaaacgtctagataaatgtaccaactactctcaataatttggcctgcccaaataaactaattttaagccaaattatggtacaaacacatacccctgttttcagtataagaatcataacttttttttaccgaaaacactataaaaattaaccactaatatgatatttgtcctaaaccaatccacagtcatcttcttagaacgatactttgaacacggtatcagttctgagcccatccatagtcgtcctctcaaaatgatactcaaataggtatccgttttaagcctatccacagtcgttctctcaaaacaatactcaaataagcattcgtcttgagacaatcaaacctcctacaaataccttctcaaatattttccatttagtacaaattttactactaattcggtcatcactaatgtccacctaaccgaattaacctatcctccaattctggctatgatactacactatctgtagctattaaccaccaggtactagctcagccacaacgacaagacgtacaagcccctgtctccattgtattcagctagccgaaccatcatactccaatgaggcatgtacactactaccagaacgtacacgtacgcatacacctcattagcaccgaaaccacatgcatgtactgtgtacccctatcagaattcagaactacccggcaccagcactactgcatgtattcaccaaagtgttactactagataaatcggcttgcactaaattgccatgcaaactaacactacaatttgagccgattcattcagtagcagttaacaagaagacttgcgtcaagtaatttgctttgctatcttccttcctcaatatatgacgaacagtaaaggtatcaagcggtttgattaaaactaaacatcgatccatataacaatttagcaatcactggtggagaaacgatttttagttccggttgggaactcctctatagtcccagtttttcaaccgggagtaacaatccgggactaaagatatctttagtcccgggtatatctttagtcccggttcaaatacccgggactaaagatcgatcgggactaaagatgtggtcccggttggagggttttttcttttttttttttcttttctctcttcctttttcactgttcttttgctatttgaccaaatcatctcagatcaaacattcacagcattatctcagatcaaacattcacagcacacagcaatatagttcatccaaatcattcacagcaatagttcatcccaaatcatccacacaatagtttatccccaaatcattcacaacaacaacacagatcaaatcacacattcaactcaatcaacacacagatcgaatcgcacattaaggaaaaaaagaaaaaaaatccaagctccagcttccaccgcctgccgctgcaccagccgccgccaggcgcggccctctgcgcgtgaccgccgcccagccgcctcccctccggatccgccgccgcccggctgccgcggtgtcacaccctgaaaattcaaaatatataaattgttgtttaaatggaatttttagaatttattgtaaaagcctagaagagaagatctaattttaattaataaattccaatataaaatggggccagataaaatttcattaaatactttgcttaattctataattcctagatttttctgggatttatttgagctaaggaagtatttttaataaatggaattgcatttaagaaataatttaaattgaaaaaggttttaaaaagtctcttttggctttgggccgaaagtcggcccaaaacccttctctctctcctcggcccagccgacccagtccgcagccgccggcgcccgcgcgtccgcccgctgacaggtggggcccgcctgtcaggtcgtcgtcttcctccggccgaaacccaagcgccgcgccgccgccgccgctttccaattcggccgatcctttccttctccggccgaatcaatagaggagaaatgatcctcgagatctcctctaccttttctcctttggaaacaccggctaaaatcgtttggaaattcgtggattcgagtttgtttcggattcgattttcccgaactttccttctcgtcgccagccgccgtgggccttcgtcgtcgtctcctagcccctttaaaaggttccccggtgtctcctctacccgccgccaccttcgccttcgcctctcgtcgtcggaaacgccctagcgccgtgtgccctagcgccgccgtcgtcgccgtcgctccagccgtgcgccgccgccgttccagacgtcgccgtcgctcgggaagaccgccgtcgtggtcgccaagtcgtcgccgtcctcgtccgccccttcgctgtcgctgtagaccgccggagcaccgtcgccgtcgtcaagccgaagagcgtcgccgcttcttcttcgtcgccgtcgccgtccgttcctcttccgccgtcgctttggtcgccggtgagttcgccgtgccgtccgctacccgttggtgccttccgttcgcgccgccgtgccgtcgttcgccggcgagcatgcaagcccgagccgccgagccgccgccgccggtggtgacgtcatcgctgacgtcatcgtggctgtccgccgtgagccggtcgtggaccgatcgatctcgaccgtccgttttggatcgagtcgatctcggccgtccgttcgcgtgaaccgccgccgtgcgcccggtccaccgaaaccctagcccgctgacgcaataatcctccttttccttttcaaaaataattcattattgcgtcataattcaattaaaatcaatttaagtgttttaatccgatttaatcttcaaaaattcataactaattcatcttagctccgatttagttggttcaagtctctaaatttttctaaaattgagatctacatattaaaaatatccacatgtactgtttatgcttgtttatgtgctgttttggtgattttgctcttttctgcttagattccgtcgtttccggagagtccgtttttgccggagaagagtttgaagagttccaaggccagcaaggcaagtcacacagatcccaaacaaccctttgagcatgttgatcatgtttaaagctattgtttcttttcaactattgcatttattttcgaatgtcattgggtggaattaacctattcattgttatagccctttttgttcttgattactttattccttgatcccttgggttattataatttgactagttgagctttatttatatgggttcaattagacattagatataattgcttagccatgcttagaaacattagctcactattgggataacttatgactcactattatttaatgatggcttaatgatagttcacgatggacaatcgtgattagttaatgtcacgcccggaatttctatccaaaattccaaacgcttacatgtgtgtgaaccctcgtccaggaatcagccgaggcacacaataacaaattgataatagagtacaaatattactctaattaataagcgaataaaatgtcattacagaggtagatagttcctctcaatcaataaagatctaagcagcggaaaataaataaacggcgcagacggctccactccacaggcagcttgaccaaggctacacctaatcctccacaccatcagcctcattgtagaactcttcctctgatgaatgattgcaaggtgagtatatgacatactcagcaagccacgcagcaaatatgcaagtgcacaggataacaaaggatggcataatagggttgcatttgcaaaagcagcatttagcaaacatttgagaatttaataaaacagttaagtaattaaacaatattaatccaacgctatacaacataccctgttgtataggcccaaccattctgaacaaccatcccggctgcacagttctatctccaaaccaggaatgtaccattccaaaccaggagctaatcaaattattaccagtttaagcatcttttacaatgatgagaggtgtgagactaatcacgaaagacattgttagacccgcccataaccgcgggcacggctattcgaatagttttactctgatcagaggtgtaccactgtacccacaagacacaaccccacatcatgtcaccatgtgcctcaataccaccacggtatctcggaaaggagttgtgacaatacccctcgcataacacaatccactgcagcgcaccttcctggatcataatcacccccttataaacaaggcatggactccccagcgacccccgtgggcttatctccgccacttctcagtctggtgccccgcaatgaaccatgctatacaaaagataaagtcgttgcccatgctggcttgtggttggcacggttaatgtttcacaaccgaaactcgtgaaccggtccttaattgtcatgagcacgaccaacaaaaccatgtgctcacaacccaccattaccaggttttagttggcacattaattaattaactaatcacgattgaccatcgtgaactatcatgaaaccatcattaaataatagtgagtcattagttatcccgaatgtgtactaatgtttctaagcagggctaagcaattatatctaatatctagttgaaccaatataaataaagctcaactagtcaaattgtaataacccaaggtatcaaggaataaggtaatcaaatacaaaagggccataacaaagaataggtcaattccacccaatgacattcgaaaatagatgcaatagttgaatagaaacaatagctttaaataggatcaacatgctcaaagggttgtttgggatctgtgtgacttgccttgctggccttggaactcttcaaactcttcttctgcgaaaacggactctccggaaacgacggaatctaagcagaaaagagcaaaatcaccaaaacagcacataaacaagcatgaacagtacatgtggatatttttaatgtgtaaatctcaattttagaagaatttagagacttgaaccaactaaatcggagctaagatgaattagttatgaatttttaaagattaaatcggattaaaacacttatatcggttaaaattgaattatgacgcaataatgaattatttttgaaaaggaaaagagaattattgcgtcagcgggctagggtttggtggaccgggcgcacgggcgacggttcacgcgaacggacggccgagatcgatccatccaaaacggacggccgagatcgatcgggtccacggcggctcacggcggacgaccccgatgacgtcagcggtgacgtcaccgacagcggcggcggctcggcggagcggacggctcgggcggcgcacactcaccggcaaacggcggcgctaggacgcaaacggagggcaccaagatgtagaggacaacacggcgaactcaccggtgacctaaacggcggcggaagaccaacagacggcgacggcgacgaggaggaagcggcgggaaccttcgggtcgacgacggcgaagctgctccggtgatctccggcgacggcgaaggggcggacgaggacggcgacgacttggcgagcacgacggtggttttcccgagcgacggcgacggctgaaacgacggcggcgcacggctggagcggcggcggcgacggcgaagctagggcacacggcgctagagcgattccgacgactagaagcgaaggcaagggtggcgacgggtagaggagacaccgggggtccttttaaaggggctcggaggcggcggcgaaggcccacggcgacggcaacggcgaaggaaagctcgggaagaacaaatccgagacgaactcgaatccaactctttccaaaacgatttagccaaagattccaaaggagaaaaggtagaggagatcccaaggatcatttcccctctttcaattcggccggagaaggaaaggaacggccggatttggaaaggaaacggcggcggcgcgaaactagggtttcggcggcggcggccgaaggtagacgacgactaacaggtgggccccacctgtcagcgagcgagggcgcgcgcgcgggcggcggactgggccggcttgggccgaggagagagaagagaggttttgggccgactttcggcccaaagccaaaagaagactttttaaaacctttttcaatttaaattatttcttaaatgcaattccatttattaaaaatacttccttagctcaaataaatcccagaaaaatctaggaattatagaattaagcaaagtatttaatgaaattttatctggccccattttatattggaatttattaattaaaacaagatcttctcttcaagacttttaaaattatttctagaaattccatttaaacaacaatttataaattttaaaaaattttcagggtgtgacagttaattaattaatgtgccaactaaaacctgataatggtgggttgtgagcacatggttttgatggtcgtgctcatgacaattaaggaccggttcacgagtttcggttgtgaaacattaatcgtgccaaccacaagccagcgtgggcaacggctttatcttttgtatagcatggttcattgcggggcaccagactgagaagtggcggagataagcccacgggggtcgctggggagtccatgccttgtttataagggggtgattatgatccaggaaggtgcgctgcggtggattgtgttatgcaaggggtattgtcacaactcctttccgaggtaccgtggtggtattgaggcacatggtgacatgatgtggggttgtgtcttgtgggtacagtggtacacctctgatcagagtaaaactattcgaatagccgtgcccgcggttatgggcgggtctaacaatgtctttcgtgattagtttcacacttctcaccatagttaatgatgctataactggtaataatttgattagctcctggtttggaatggtatattcctggtttggagatagaactgtgcagccggggtggttgttcagaatggttgggcctatgcaacagggtatgttgtatagcgttgatttaatattgtttaattattacttaactgttttattaaattctcaaaagtttgttaaatgctgcttttgcaaatgaaaccctactatgccatcctttgttatcctgtgcacttgcatatttgctgcgtggcttgctgagtatgtcatatactcaccttgcaatcattcatcagaggaagagttcttcaatgaggctgatggtgtggaggattaggtgtagccttggtcaagctgcctgtggagtggagccgtctgcgccgtttatctttctttccgctgcttagatctttattgattgagaggaactatctacctctgtaatgacattttattcgcttattaattagagtaatatttgtactctattatcaatttgttattgtgtgcctcggctgattcctggacgagggttcacacacatgtaagcgtttggaattttggatagaaattccgggcgtgacaagttggtatcagagccccttgaccctaggttatgccaaacggttacccatagaagccctctaaaaatattggaaaagtagaactgttctcctccctttctcttttaaaccaaactaatggcacatgcacttcataatctcttttaatggttctcattaaaaatttattccagtgttattagtactgtacatctattactgtactaatggctcatttaccagcaaaagttttacaatattgctttatttaatcttgctgcaataaaataaatttagcatgttgattttataactttctttcatttcttttgaaacctgttattcaaaagtacaaaacttgtgacctcgtttccaactgtttcaacttatcttgcaagcttggtttactttgtttacttacctttttactttgattttctaactttattcaaattaatccaaaaacttttgctattaattggataaatgtcttaactccctcctttcacttgtctttagatgccgcgctacaagcctgagtacttgtttggtgttgagggttttgtccaggagttgcgtacaatgtcctttgtcattggatttgggactgcccctttttatgcccagattcctcatgatcgtcatgaagagaagtgccgagtcaaagtcaccttgaacagtaatagtgaagatatcccctcagtgatgttcaaagctggaggaagaaactacatccatgcatgtcaggaagtggcaaggatcgccataggagagcttcgcgatcgctacagtgatcaattggccgacactgagtatcgctaccatcctcgtcaaccacagggaagtgaccgtggcagttaccttgagactgaaggaattgagaatgatgctaccacaaggcatttggtggagatgctgtgggctatggatgaaagtcgtgcggagattgtgttagcagctcaagatcgtgaagaccggaatcgtggtaagatttgcaagctagaagacaaagtggatcgtttggagaaggaactagctgtattgaagggagaagcaccaccgcagaaggccaggattcgtctcaccgcaaggaagagagctctatttgtccctcgctatcaattggcgccaaaggttcgtgtggtggagaaagaagttgccccaaccctagcagatcctccggtcatcatcataagtgatgatgaagaagaagaatccaagcgcaaccattccaagattgagtgggtagcaactcaagatgatgaagacgagccgaacgagcctttaatcgacctccgatgctcggaagaactagagtgacttgttaagccgttgtcttagatcgttgtgttagcttgcttgttttaagtttgcttgtgtgtctcgcatgtgatttacatcagtagtgggatgtaagtgcatgcgtttgtttgcttttgagtgttaggaagttggtgagtttagtggtgtgagagtcttcagtttgtaataatgaaactcagttaagatcaataaaagttaaagtaattctctgtcctaagtagtttcccccggtttctcttcttgtgccctgtccatgccagatggtgaacactcgcagcaacgggaatggccccagtaacaataacaacggagagaatcccactcttgctcaagttcttgctcaacagacacagctaatgaacatgatgatgcagcaactccagaaccagcaaaaccaaggaaataaccatgcacctccccagaacaagttagcagaatttcttcgtgtgaggccgcctgttttctctagcaccactaatcctgttgaagctggtgattggctgcatgccatagagaagaagttggatttgcttcagtgcactgatcaggagaaggtctcatttgcatcacatcagttgcatggccctgcctctgaatggtgggatcacttccgtctgaacaggactactgctgaacctatcacttggcttgaattcaccgctgctttccggaagacgcatataccatcgggagtggtgtctctcaagaagaaggaattcaggtcgctcactcagggatctcgctctgttacggagtatttgcacgagttcaatcgtcttgctcgttatgctccggaagatgtgcgcaatgatgaagagcgccaggagaagttcttggaaggacttaatgatgagctttcttacccactcatgactggggattatcatgatttccagaagttagtggataaagctattcgccaggaggaaaagtacaatcgtatggagcaaaagaaacgccggattgctcaattcaagacacaacaggggaataatcagaagccgcgtcttactttaggaccccagtctatgccacagggaggttcttcgtctgttgttcgtccgcagcgtcagttcttcaacaacaatgctggcaacaacatccgtaatcaagctccacatcctgttgcagctccagcacagcaacaacctgccaagagggagcaaggcagcaagcccgtggtgtgtttcaactgtggagacccaggacattatgctaacaagtgtccgaagccccgacgcgtgaaagttgtccctgtccagagcaactctactgtaccagcatcaaaggcccgtgttaatcatgttgctgctgcagaagctcaagatgctccagatgtgattttgggtacgttccttgttaacttagttcctgcaacagtgcttttcgattctggtgctacacattcattcttatctatgagttttgcgggaaatcatgggatggaagtagaagatcttagacgtcctttgatggttagtaccccaagtaatcaagcactctctttgcaacgtagcccctctgtcagaatagaaattcaaggagtaccattcctggccaatcttatcttgttagaatccaaagaccttgatgtcatcctagggatggactggttagccagacataaaggtgtgatagactgtgctaacagaaaagtaactctcaccagcaatgatggtcgagttgtaactgttcatgcattgtcttctgagtctttaaggtcaagactgaaccagataactttggaagagatttctatagtccgggagtatcccgatgtgttcccatatgatttacctggtatgccgcccaaaagggatatagagttcagaatagatttggtacctggaacaactccgatccataagagaccttatagaatggcagccaatgagttggcagaagtcaagaggcaagtagatgatttgcttcagaaaggatacatcagaccgagttcatcaccatggggagctccggttatttttgtggaaaagaaagaccatacccagagaatgtgtgtggactatcgtgcactaaatgatgtgactatcaagaataagtatccactacccagaattgatgatttgtttgatcagcttaaaggtgctactgttttctccaagatagatcttcgatcagggtatcaccagttaagaatcaaagaggaagatatacctaagacagcttttaccactaggtatgggttgttcgaatgtactgttatgtcttttggacttaccaatgcccccgctttcttcatgaacttgatgaataaggtgtttatggaatacctagacaagtttgtggcggtctttattgatgacattcttatctactctcgaaccaaagaagagcatgaagaacatcttcgccttgcactagagaagttacgagaacatcaactgtatgctaagtttagcaagtgtgaattttggttgtctgaagtgaagttccttggtcacgtcatctcagccggaggagttgccgttgatcctagtaatgtggaatccgtaaccaactggaaacaaccgaagacagtttcagagatccgcagtttcctaggcctcgcaggatattatcggaggtttatagagaatttttccaagattgctaagcccatgacacgactgcttcagaaagatgtgaagtacaagtggtcggaagaatgtgagcagagttttcaagagttgaaaagtcgcttgatatcagctcctattttgattttacctgatccaaagaagggtttccaagtgtattgcgatgcatccaaacttgggttaggttgtcttctaatgcaagatggaaaggtggttgcctatgcatctcgtcagttacgtccgcatgagaagaactaccctactcatgatcttgagttagctgtagtagttcatgcgttgaaaatttggcgtcattatcttttcggtactcgtacagaggtatataccgatcacaagagtttaaagtatatctttactcagccggatctgaacatgagacaacggagatggttggaactaattaaggattatgacataggaattcattatcacccgggaaaggctaatgttgtagcagacgctcttagtagaaaaggctattgcaatgctacggaaggacgacagctgccattggaattatgcaaggaatttgaaagattaaatttgggaattgtcagtagaggtttcgttgcagccttagaagcgaagcccactctaattgatcaagttagagaagcccaaattaatgatcctgatattcaagagatcaagaaaaatatgagaagaggaaaagctatcggtttcttggaggatgagcacggaactgtatggttgggtgagagaatctgtgtccccgacaacaaagatttaaaagatgcaattctgaaagaagctcatgatactttatactccattcaccctggtagtactaagatgtaccaggatctcaaggaaagattttggtgggcaagtatgaagcgtgaaatcgcagaatacgtagcagtatgtgatgtttgtcagcgagtcaaggcagaacatcagaaacccgccggtttgttgcagcctttgaagattcctgaatggaagtgggaagaaatcggtatggattttatcactggtttacccagaacgtcatcaggtcatgactctatttgggtgatagtcgacagacttaccaaagtagctcatttcattccggtaaagacaacctattccggaagtcgcttagcggaattgtacatggcaaggattgtgtgtttgcatggcgtccctaagaaaatagtgtctgatcgaggcagtcagtttacctcaaatttttggaagaaacttcaggaagagatgggttctaagctgaactttagtactgcttatcatccgcagacagacggacaaaccgaaagggtgaatcagattttagaagacatgttgagagcttgtgctttagatttcgatggaagttgggataagaatctaccttatgcagaattttcgtacaacaacagttatcaagctagtcttcagatggctccttacgaagcactgtatggtcggaagtgtcgcactccgcttttgtgggatcaaacgggagaacgtcaggttttcgggacggatatcctaagggaagcagaagaaaaggtaaagatcattcaagaaagattgcgagtggctcaatctcgtcataagagttatgccgacaatcgccgcagagatctaagttttgaaggagattatgtgtatcttcgtgtcacgcctcttagaggagttcatcgtttccacaccaaaggaaaattggcaccgcgttttgtgggaccttataagattgtcagtaaaagaggagaggttgcttatcagttggagttacctcaatctttggcaggagtccataatgtgttccatgtgtcgcaattgaaaaagtgtttaagggtacctaccgaagaagctaatctcgaacagatagaagtccaagaggatctgacctatgttgagaaaccaatccgtattttggaaacagatgagagaagaaccaggaatcgagttatccgcttttgcaaagtccaatggagtaatcactcggaagaagaatcaacttgggaacgagaagatgaattgaagtcagctcatccgcatctgttcgccagttcttccgaatctcgaggacgagattctgtttaaggggggtaggtttgtcacaccctgaaaattcaaaatatataaattgttgtttaaatggaatttttagaatttattgtaaaagcctagaagagaagatctaattttaattaataaattccaatataaaatggggccagataaaatttcattaaatactttgcttaattctataattcctagatttttctgggatttatttgagctaaggaagtatttttaataaatggaattgcatttaagaaataatttaaattgaaaaaggttttaaaaagtctcttttggctttgggccgaaagtcggcccaaaacccttctctctctcctcggcccagccggcccagtccgcagccgcccgcgcccgcgcgtccgcccgctgacaggtggggcccgcctgtcaggtcgtcgtcttcctccggccgaaaccctagcaccgcgccgccgccgccgctttccaattcggccgatcctttccttctccggccgaatcaatagaggggaaatgatcctcgagatctcctctaccttttctcttttggaaacaccggctaaaatcgtttggaaattcgtggattcgagtttgtttcggattcgattttcccgaactttccttctcgtcgccggccgccgtgggccttcgtcgtcgtctcctagcccctttaaaaggttccccggtgtctcctctacccgctgccaccttcgccttcgcctctcgtcgtcggaaacgccctagcgccgtgtgccctagcgccgccgtcgtcgccgtcgctccagccgtgcgccgccgccgttccagacgtcgtcgtcgctcgggaagaccgccgtcgtggtcgccaagtcgtcgccgtcctcgtccgccccttcgctgtcgctgtagaccgccggagcaccgtcgccgtcgtcaagccgaagagcgtcgccgcttcttcttcgtcgccgtcgccgtccgttcctcttccgccgtcgctttggtcgccggtgagtttgccgtgccgtccgctacccgttggtgccttccgttcgcgccgccgtgccgtcgttcgccggcgagcatgcaagcccgagccgccgagccgccgccgccggtggtgacatcatcgctgacgtcatcgtggctgtccgccgtgagccggtcgtggaccgatcgatctcggccgtccgttttggatcgagtcgatctcggccgtccgttcgcgtgaaccgccgccgtgcgcccggtccaccgaaaccctagcccgctgacgcaataatcctccttttccttttcaaaaataattcattattgcgtcataattcaattaaaatcaatttaagtgttttaatccgatttaatcttcaaaaattcataactaattcatcttagctccgatttagttggttcaagtctctaaatttttctaaaattgagatctacatattaaaaatatccacatgtactgtttatgcttgtttatgtgctgttttggtgattttgctcttttctgcttagattccgtcgtttccggagagtccgttttcgccggagaagagtttgaagagttccaaggccagcaaggcaagtcacacagatcccaaacaaccctttgagcatgttgatcctgtttaaagctattgtttcttttcaactattgcatttattttcgaatgtcattgggtggaattaacctattcattgttatagccctttttgttcttgattactttattccttgatcccttgggttattataatttgactagttgagctttatttatatgggttcaattagacattagatataattgcttagccatgcttagaaacattagctcactattgggataacttatgactcactattatttaatgatggcttaatgatagttcacgatggacaatcgtgattagttaattaattaatgtgccaactaaaacctgataatggtgggttgtgagcacatggttttgatggtcgtgctcatgacaattaaggaccggttcacgagtttcggttgtgaaacattaatcgtgccaaccacaagccagcgtgggcaacggctttatcttttgtatagcatggttcattgcggggcaccagactgagaagtggcggagataagcccacgggggtcgctggggagtccatgccttgtttataagggggtgattatgatccaggaaggtgcgctgcggtggattgtgttatgcaaggggtattgtcacaactcctttccgaggtaccgtggtggtattgaggcacatggtgacatgatgtggggttgtgtcttgtgggtacagtggtacacctctgatcatagtaaaactattcgaatagccgtgcccgcggttatgggcgggtctaacaatgtctttcgtgattagtttcacacttctcaccatagttaatgatgctataactggtaataatttgattagctcctggtttggaatggtatattcctggtttggagatagaactgtgcagccggggtggttgttcagaatggttgggcctatgcaacagggtatgttgtatagcgttgatttaatattgtttaattattacttaactgttttattaaattctcaaaagtttgttaaatgctgcttttgcaaatgaaaccctactatgccatcctttgttatcctgtgcacttgcatatttgctgcgtggcttgctgagtatgtcatatactcaccttgcaatcattcatcagaggaagagttcttcaatgaggctgatggtgtggaggattaggtgtagccttggtcaagctgcctgtggagtggagccgtctgcgccgtttatctttctttccgctgcttagatctttattgattgagaggaagtatctacctctgtaatgacattttattcgcttattaattagagtaatatttgtactctattatcaatttgttattgtgtgcctcggctgattcctggacgagggttcacacacatgtaagcgtttggaattttggatagaaatttcgggcgtgacacgcggcgcgaggccacctccgccctgccgcgcgagggccccgccgctgccgcccggctggccgccatggcgcgagaccgcctgcgcctctatccggccgccgccgccgcttggccgctgacgaaagagaagagaggggaggaatagaatggggagaggaggaggaggaagaggaagagatgggaggagcaagagataaggttagggaagagataaggaatagaatttattaactcctccatctcgcgcatgcctcgtcctctccgccacgcatgcgcgcatggtgatattttgttccagtttaggctaccaatcgggactacaaatagatccaccaaccgggactaaagataataggtatctctagtctcggttggtattatcaaccgggactaaaaattgatctttagtcccggttgagaacaccaaccggaacaaaagataaaaaagtagctataacccggtttttattgcaaccgggactattgtggtttttggctgaccgaccaaagatggtttcttcaccagtgaatcctaaactccccaactaaattggtggactactagcagcaaatcacccaaagcatctacatcctcacaccaatattaactaaatttccaaaccgaataacaaagccttgtattcggtctaaagtgtaagggtattccaaataaaccgatgtctcataagcaaatactatttggcaaaactaaaacagtaccaacatcttgccgacttgcacaaaatatgaccgaaataaattataaaaaaaataaaaaaatcacagttatttctagctcccaaatatttcggtctctaaaaattgataacaacatctacaattattagtaaatatacaaaactatatggtaacatccctccataatatagactcatatgatatccaagaatcataataagaccatgaaggataaccttacatacctgagaattgattccaagacatatgcatcggttgcataggtgaagaatatatataatatggtggcaaaagaacctgatgatctgatgcaaaccgttgatttggcacacacctcctaactaccttctcattctttgcctccactttaactttaacatctgttttattctgcacctgaacacttcctttaggaagccatgacatacctttctccctcagcttttctacacttagcttgtggagctgcttcttctgccaattcgacaagctgtgtgaatgtctcagttggctgccattgccccccgagctcttcggcggatcctgatttgttactaactctgccgaagatgtctctcacttcatactcacatgatgtacattttctagctgttgtacacgtgcatgccccccaggttcaataaccttttttctaaactaaagccttttgtacactcacacatgcaccagcagctaagctcttttcttgaactctagacttcggcacctagatttgcttccttgttgaactacctcccacctgtaccgaagacttctttctactagaccacctagaccgatttctcttatcaaatcggttatccatggcatgtgacttttctggagttgcaacatgcaatcgaccttcattaatagctgattgtattttctgacgaaaaatattacaatcactagtgcaatgatcaaatgaattatgccacttacaataaatttgttcttctaaatcttgaagcgatggcatgacatgatgatccggcaatttaatataatcattctttagcaaatcatcaaaaatatgatcacacatactccaatcaaaagtatacttcttttcctttaaccgacacttttgtggagacggttttaaagctaagcaaacaaatggttcagatttactatctacccattcggctacattgtcgcttatatttcccttgtccaatgatttagaactatctgctatatcagcaccaattttaattttgtgcttctagctctagattgatcataagcaaaccatgtagacataaactttgtcaatgatgaaatagaaaatttaaacactttattattgccaacaagaatattaatctccccaatcgatctgttagaattattcatggtgacattattaatgtatggattattttcagaagcatgatcaaattgagaaataagcaaattacctgtaaacgttaccttatctaatgtgttggagaagcattctgattttttcacttgaatgatgtctaagttcgttcattgatggctctccaatatttccgccttgtcgtcgcgatttcgtgatccatcgtctagatgttcatccacttccttggcacgaaattcagctggcaaaacaaaaggtcctatgtttccagataaatcaagcatagctacctccttttcattagccgataattctaaatttatcggcttttgctgtttcgcaataacactattctttgttttctgcaagcgtatgagtttatgttcccttagctctgcaatttctacctcgacttcctgctctaactcacaccgttggccctcagataaatcgtctagtgtgacagtgttattgtcgagatcgaaattgtgctcttgatcaatgttggcaatttttgacataggtatttcagtttgcccccaaccgaatttacacaatttgaactctgcgtgtttgaccatatacatagtactatttgattgacattttgaagatggcaaactatgtgggggtacaaaatcactagtggaactactattaattcggctataatcgctactagcatatgaagccgaattatttccactagatactatataaggtgacccataagactgagatgtgactgaccgatacttggcatgccatgcaatgaattaaaagaatcaactggataattaatattgtcatggccatacatatctttcatcggcaaaatttgttgtgtaacagtaggttgtgaaataatcgccgatgaattaaaaggtgtgtgtatatattgtatattactagcattactgaattttaaagtatgtgaattactttgcataggcagtgacatattattttcgtaattcaaagatctcgaataattatttgaataatcactagcaaatgcaatatgtccattaaaaataggtctagcaatatttgtatgagaatatgtggcacttgtaaaattgtttaaagaaattggtgtagattgtacctcacaattaacatagtaaggttgcggcgtagtagtccagtatgtctccatgaattttgtagcagggcttgttcttttcctggtgcaattcgtgtacctagcaaaaatcagagaaattaatttgcacttacagaccgtgaattggttgatcgctagccaactgatctccttgttgaccagtgtatgtagttcactgttcccaatgcaaaagtttctatacaaaagttgcttaaaaaaatcatattaatcatattgatctatttttgaaaaaaaattaaccaatacttaattagtcgcgcgctaatggactattccgttttccgtgcactaatggctggttgggaacatcccctacgaacacagcctaagtacatgaattattttcatcagcctgatttgaaaaaaaaaaaaactacttagaataccatattaaagactactgatgtgagaatctgcacaaccattgtctaattgaacttctgactgaacttttgttcaattagacaattaggcaaggatcatctgactgaacttgacacagcaagtcggcaggtggaggtatcctgatagataaacagatcacataaacaactcaaacatcgcaaacctgccaatctcataataagagaacattaatttgcagctttacttacttcgatttcattttttctcaggtcaagaacaaaatttacatcaatgcgcggttgcaatctgagtagtgatcttttactccgtacagtgatgacgcaaaacttacaggagatgagctactacaactaattacacttcgcatgtccatggaaataaggtttgcatatactaactctgattctctaaaacaagtctccgtatttcaggctccttgcagcatatggctttactctcagcttgctattcttgcccaactgcttgtggagttgtggggtgaaacaggtatcaccacctgcagaagaagttctagttctgaaagacaacataccttccatgatacattgatgccttgttgcctccagataggctcagaagtctatcatacctgttcaacatttgggggagatcacgaaaatgtattcagcagtgaaccctagatggtagtgaaggttatatacatatacatgggccaaatgggctaagtgggccaactgaaccaaaacagaaatatatatatggtgtatacattaacaccccctgtcaaactctaggtggatcaacagccttgagtttggaaagaagaaaatcatgctggtctcgtgtttgcggtttggtgaagaagtcagcaacttgaagttcagagggcaagtaatgaagacagattgtcctgtgttgataatgaaatcgggtaaaagaagcatcagtccctatgtgtttgctgagttcatgtttgacaggatttgaggctatttggatagcacttgtgttatcacaaaacaatgaagttggttgtgagaggacaacaccaagatctgcaagtagccaacggagccatataacttcagctgttgtagttgcaagagctcgtaattcagcctcagcgcttgaacgagagatagctgtctgtttctttgacttccaagcaagaagagaagatcccaggaagatacaatagccagtaatagagcatcgatcaatagggtcacttgcccaagtggaatctgaataagcttgaagctctaatgagctatcacgggagaaaaatataccacgagatggcgtcccacgtagatagcggagcactcgtaataggtgagcataatggacagatgtaggggcactagtaaattgactcagaacatgaacagcatgtgagatatccggtcgagtaacagcaagatatacaagacttccaacaatatgtcggtatcgagaaggatctgaaagtggattcccatcagtaggacgaatcttgagatgaagctccataggagtggcagcagttttatcatcacttagaccagagcgagatagtaagtcgagagtatatcgatgctgagacaaatgaaaaccattcggtgttgaagcaacctcaatgcccagaaaatactttagtggtccaagatcagtcatcatgaattgctcacttagacgttgcttcacgaaggcaacatgagaagcgtcatcacccgttatgatcatatcatcaacatagagcaagagaatcgtacgacctcgagaagaagtgtggataaatagggcagaatcatgctcactagcaacaaatccagcttttagaacaactgagctaaagcgctcaaaccaagctcgtggagcttgcttaagaccatataaagcacggcgtaggcgcaacacatgaccagatggacatgtcaaacctggtggaggctgcatgtagacttcctcttgcaaatcaccatgaagaaatgcattcttcacatccatctgtgagatctcccattgacgagttgcagctacagctataagggtacggacagtagtcatgtgagcaactggggcaaaagtctcatcataatctcgaccatattcctgctgaaaaccacgagcaaccaagcgggccttataccgttcaatagatccattagagcgagttttcaccttaaacacccacttgcaagtaattggaacagcatgatggggaagaggaacaacatcccatgtacccgtgcgctctaaggcagaaagttcctcattcatagccaatttccattcattaattgtaacagcctcttgatatgtgcgaggctcctgaacaccatcagctattgcacaactgtaacgaggatgtggcataattttactgcgatctcgaagaccatatcgtgctgcaggagatggtgatgatggtataggcatatcatcaacaggtagctcattagaatcatcaagtgggtgagagacaagggaaacctattgcttcctagcagattcggtaggcagcagcaaagaagattgaggacaggggaaacttgccggcggaggagaagagattattagcagcagagcagatcgctgatgcgacgtccaggacgcagctccggcgaatcccaggcaagctctgataccatgttcaacatttgggggagatcacgaaaatgtattcagcagtgaaccctagatggtagtgaaggttatatacatatacatgggccaaatgggctaagtgggccaactgaaccaaaacagaaatatatatatggtgtatacattaacaataccaaagatgctctctaccgaaggattcactaaacaacctttcatattttcatctttatttcctaaacctaaactcaactttttagtaatggacacaatttctcggtccaggaaaacagagaatgcgaccaataagaggatttaagaaaaaaatcaaagggctatacctatactgtactgcactagtcactagatattagtaatggtaagaatagggcctcaaggtagtttgatatacaaatggttgctcctatagacataggaggctatagaagacaaggggtatgaaagcattgtcgagttgggctgtataagcttccaataaaccgctcaacgtcacagctaccaaaagtgatatccaatgctgtgttaatataaaaagagatggtcaggatttatgcttgctttatattgtagaataaaagcttcaaacggttcaatgccaggggggaaagtaaaacctgtgaaagtatgtagccacttgaagctaggagtgacagcaggattgagcaggctgctaatgcagaagttatgcctgctgctgtgccctcaattgttttctctaacatttcaaaagtatgtgcataagagatcaattatcaatcatggaataaataataatggaaattaaactcacttcctgtcttgctccatcttaggacaccatacttataacatatcattgatgcctaggtaaaacaagagaattcatcatactgaatgcagctaacataagaaaatattaactgatcacacactggacatagaacttaccatggtatcaccaatacccaagctgagaattccagcaaatggtgtaagaggtcggtcattgaatcctgatgacatccatttaggaagtgcacatcccagcaagagtgagaaatgactgaacaaaacaaatatagtattaggtctatccaagcactaaacatgtaaatgagttaaaatctggaaaacaacgaccattaatccagacctacctaacaattagaatctccgaatcgcggtgatcagtgaaggcactcatgaactgatgcacaatatgcccaagagggtatatttcccaaacctgaggtcagggtgaaacatttcgtcggagaaattagcacatgttggcatacaaactgccaaaaaacagagaaaggggagaaagaaacaggacacaaataaagaaaatgcttactcgaaccatctccaatattaagaaaacggcaaatgtgtggcatgatgtgtggcatggcgcatgccctttgaaaatttgcttcccaagaatttttgagatttgcaatcaacaaaacatcttagttgctgaggtctctgcaaatgctaatgctctcactttcagaaggtcttttggggagagagagtctgaggaatggctagctattggggatatcattaactctattgagttgtctgatgacccagatgtgttcctttgggggcttgataagaataaaacttacacctctaaatccatgtatagagcaattctctttaggggagtgactgacactagaatgcagggtgtgtggaattgtccctgtcctgaaaaaattaaacactttctatggcttgctttgaaaaacaggatacaatctgctgaacagctgaagaaaaaaggatggaagggctctgagttttgtgtactttgtgggatgcttgaaaccactgatcacattcttttccagtgtccaatggcctctttagtctggtgcttatgcagagatgcttttggcttggagtattatacctaggtcttttgaggatttcttcctgatcaatggctctttgggtggggctgatctgagagttttcttgaccctacttgctgcagtttgctgggtgttgtggtccactagaaacaacatgatttttagagaaaaattagtctactcacccctatcattaatgttccaaatcaattcatttttgcagctctggagaatccttagcagcaaggacactgagaaaattgacaagattttttttttttttgccgggtcggccgaaggaactggcgaccaaatttcattaagattgggaggaataaaatcaaagtacaagtagttttcgcttgcaacgacaggaggctgtcgaattagactgtggcaggaaccacagcccggcaaactaaaaaactggaacgccaacacaacagaaagaaaactaagaactgcaattctcgaaatagcctgcttctttccacactaagatctcttctttgatagcctctgctaactggttagggcttctcgatctttggtcgaaaattgacaagattactgggaagctcatggatgctacttcaactttgagacaaccaagatctggagttggctgatcgtctgaagtttttagttcttagtcgtttgcttagcttgagagtttgttaagcctgtcttagagttgttttgtttccttttagtgctggtcagcttttatcccccctaatggtgttaattctggacctttcctgtgtgtgatgtaaaatgggtatcccccataacgatgccgtgtttggctttctataaaaagccgggcctaatggcctcagtttcaaaagaaaacggcaaatgctgcaccaaatgctaagcccaagaaatcaggcgcaaagagaaacaatttattgagagtgtgtttcaaacaatctgatggggatcgaataaggaaaacatacaatacctgaaatattattgcaggagagaaaattaggacagcaacgggatggtaatacttgcgcaaaagaatcctctccgttttgctttgttttgatatactgtagaaccttctaattgatacatatatcacaaatatccagtatgcgcataaagcaagccgttcacgtgaatcggtgaaaatatagttaaaaaccctgtcaaacaataaaccattaagtgaaccaaaattcaatatgtacaaaaatgcacaaggtttagaagcaacaacagaaagaaatttttcaatatttgactaacagatttcgtgcttttatgcccttccaatgaaatgcaaacttatatgctcaccaaacaaatggatgcacttcaaaatcttgaataagacgcgtccatgatggcactaacaacaatagtgctaccaacaatgaaacataaaatacatcacagtcaattctcttctgtgtgcattcctcaactgtttgtgttctttgcctccccagttttctacagtaagccaaaacttgaacggaacttttgtataacaaggggagaagaaaaggaccaagcaaaaccccctgcagaaaagaaaaaaaagggaagggtattatgcactaagaaactgaagccatacaacgcaataacttctacctgaataactgtgcctatctagcttcgagttccaggtgcgcgaataaatgcttctgatgatacggagaacttcatctgccagcagcacggttgcaaacgtgaaggcaacaaaataagtatcagatttgctaccattttgctggtaaaacatatatagttcaaggaataaatcacacctttgaaagagtatgagccagcatatcaccacagtaaagaaaaagaccacttgagaccaaaatggcctcccctaagttcacacaaaatgtaaagataagttaaaaaaaaaaagcaattgcttcaagtcatgatgaaaaggagacatatacattgcatcggccaataggaacctcacaaattagctgaatttaaattttaaaaaatgaacagtgtagatataatgcactatgcctgcatggaaactggtaggataactagaaatcgtatggatagctctaaagtataaacatatgcagtcagatatacacaaaaaaactttatctaattacatcttagacttcaggtacaaaccaaaagatgaacatgaagggaacttctctagaatatgctggattaagatcacagcagccactccacgacagagcaaatacaccaaattactcatcaccagcagatctattaagacaaaacctagattagtttgtaattccttgcttctgatgaacttccaccagattttgaaaagaaagggtgagattatatctttgcatgcagataaaatatgcgtgtacctccatcagtcttcagtaaaaagtggaacaagtatgccaggggatataaaatgatgagcaacgagccgtatttcgaagctatagaatttccattgctgggagactgccgtacatgccaaacaaaaaatgctaacacgctgaggcagctaacagatactgcccagtactgcatttcaaggtatgcatattctgacaatgaacacatatagttagtaaacctgatgtgttaccgaaaatcttagtgtcaaacaagatttgaaatgttgatgaagacttaggaaaatatccatttagtagtggatctgataaatttgataaaatagaaaaaatggataccttctcgtccattaggatctgctagtaagaccctataaagttgaattaaccgtgaaagcatgacactaggcagagtagtggcgccaagaagtatgcctgatgaagcacctggcctggatcaagagcatcaagagcatcaagccaccacaagaaggtgaagttttatgctattcctcacaacacaagacatgacgaatcttacggtaagcaactaggattgcacatcacagaacccatataaatgacagtgggagcaacgtttttgctgaaaatgcaatggaacagtatttgtgaaatgggttaactaagaaatgctgaagcccaattattcaagagtgatatttgtcccttggattcttggaaccaccaaaacctgaccattttgcacactactgaaccaaaagaaaatccactaagcctcaagtaaaaataaaatcgcattcctgctgtatgctgaatccgactgatgttgtttccccaattgcatgatcctcacagggaggcaaccagcattgaagcaacaaatggatcaattcacctggtcctgaaccggcgggcggagcggggatgaggacgtggcgggggagccatccacggcgagctcgacggcgagggcggccgcggcgaggaccgcgggcgacgaagaggaacaacgacgagcctatctggatttttcacattttggtccttttaaaaaatttatttcgcaaatagacctaaaaaaatatcctataaatggtcatttttggatgccagagtggctggggccgtcgtccaacaggacagcgccaacctctctatcgccgtccccccgccgatgtggaatgaactcaaatggacggaatatgtaacttgtagaatttttcctttcttctcctctcttcgaagtgcagaggagagagttgtgtaacttttttattttaattttaattttttgatattttttgcacgcttaggaacacaaaagaaccaaccatataaaaaataaacttaaacggatgaaatatgtgacatatgtgaaattttacaaagctctactaaaaacatgtctcctcgaaaatccagacgagcctctcgcccgagaccaccgccggcgcacgaacgcgactacgctagcctcgggttcggttgggtcggccgccttggtggttctgactgacagctgggtcaaagcgcacgaacgaagggagcgcggcgcgaaccggacggaggaggagaggtgggctctgtagcctgggtcgggccttggtggctctgactgacaggtgggtcaaagcggttgagccgtcgcgtccgacacgggtgtgggtgtggtgcaccgtgcacgcgcaccggaccgacctggtcctcttgcgtggcgtgtgcgcgacgcggagagaaacgattttgtgcctcgtatctgtgggcgtttgcgtcgacgtcgtcgtctactgatgggcgttgggttggatgggaatatggaatgattcctgagcattttgtaccacctctccaggcaaaattcacaagtgttgcaatgttcaagcaaaattcgtgttctgtactatcaaatataagttcgacatccacaactcatgttctcagataggtacagaatttaaagcaactttaggtaactagtgactgatgaggagcttgtctgatggatcacaaaccacaacatacgcaatacaatttaaaacattttctaaagtaacaactaacagtccgggaagaaaacagacactatacgatctaaccatccatccattgatccatcaactcagagcagggtagtaatactaataccacgttccaggcatagtaataacattactaatacagactctaataataagacaagttcacaatctcgatagtagctttataacatttttttgctaataatacagttattgggacagcagtaatactatgttgatcattttctcttcagagcggagaggatcatgcaacggcaacaaagtgtgacatgcaggacagatatcatctccttgggatcttttaatctaagggaactcctcagcaaaccgggtcaaaataccctgaacacaaaaccagtaacaaaaacgtcagtgcatcagaacaggtagcaatttatcattacattacacaagtaaacaagggggaaatatatcctaaacattgcacccccttcagaagcaacaagcctgcaaatacagaaaaaagaaatgcaacttcaatgaaaatgcatccatcacaagtaaacaccataaattgaatatctgctaactcaaatatcactgagttcaagcttcacacgcatatattgggtgacggtacatggaaatgtacatcctgcctgccaatgcgttctcacatcagatgtgttctttgcatagagggaagaaaaaggcagaacataaagcaaatttgcagaaagaaacatgaaaggaaaaacgaactagtgcctgcacactatggttcatatgataacaataaccaaagcgttggcaccactgaaaaggagcaaacagaacaaaacagctgttggtgcaacctagtccattcaatataggcagctcgtgatagatgttcactgaaatcaagtaaccaagaagaccatacaattctagcatatcaatgtaaagtgaattataaaaagctgagctctatttccaacaggtcaaactgcctaaggcctaataacatacagcagcccaggctaaggatgcccatttgttgaggaacagtacaaactgataaaacacttgcaaggacagcagtaaacgaaaaggaatcatacatgcgagtaatgcaatggttgctctttagaaaaagagagcacctgaatgaacaaatgtgaacccatgatacaatatcacaacttacttcgtaactaacagcagaagtttcaataatatttgccacaaaatttaagtaaaataataggaaagaaacaacacttacattgaacagacaaacatcgccagctctggacggctgtagatattatccccatcgtcatccagtgcaggataagcagcaacaagcgcatcttgtgcagcaatatatagttgagttgtagattttccaatatacttcacatactttccttgctggatggaaaaggccttgaaggcagtaattcaagatcacagctggaccaagagcaactctcatcccctcaatcgcctccatgacagcattgatgacatggggagatgtctcaaatatgtttggcaccaagagccatgtgcttcacagcagaggcagcagtttgccagtgaacaagatctctgtccattagagcatcgtcaaccaagggagtaacagcatatatgtaatccttgcccatctcaccaatatactcaaagaggaaagagagagacttcaggacaccattctgaacattgagttctgggactcggtactcattcatcagggcaggcagaactgtaaaaggtgagcaggtttcagcaacaatggcaatcgcgacagtcgtgcagacacggttttgccgttcctgcaccttcaagtaattcaacagagtagccaacacatcctgcagcccaatagccttcgcaatataaccaaatgtgttcacggtggctcttctaatacccttcttgtgagccttcaacatttcaagaagctcaaaacaaatcctcatccactccctagcaggcacaaattctgctccacgatcagcaatcctaccaactagatcaatgcagttctcctggaccttttcatgcctgttcttcaaaataggagtcagtcgaggaagaagattcttgatcagcggtgtcatcttagtcatgccaatgacattcacaatagctttcagtgctccaagaattgaacccaacacctcagggtactcctctcccaaatactcatacagcacaacacccaagtgacccataagctgctcctcctggcaatgtttcattacaatggctatccttgagatcagatcagcagcttgctgcctaacttttgcactcttgttgttcaaccgccacttaatggtaccacaaatctgaggaaggtaaggcttgaccccctgtcccagtgcattgacaacagccccaaaaccattaagcatgacatttgcatcgtcacttgcctgctcttggaaagcatacaagatgccatcaataagcagctcctccaaacgagcatcaatatctgaagcacccaaattagccactaccttctcaactgtttccattaccattctcctgtaaggttcgctttcatctttcagatcctcaacaatcctcccaacaatatcagcaactccaaccttatttgccatctctaccgttgtttccacaagctgcttatagttcctgcggtccagagccattctcctaacccagaagtgatggaaaaattcaggaaggatgtcattccagatataatcagcctctacaccctctgtactgacacactgtttaacaaccttcaggacaatctttttcatctcttcatctggtgactggaactccctaatcaggatttgcatgacctcctttgtgtagtaactggcatacagcgcatccataagagggatgataaaaccaattgctttcaagaaggcagcaagaacctttccacggttagatctgatacccttccacagaggcttcaaaacagtatcaaaactttctataccatatggtgcagcagcctcagcaagtgcagcaagagaaagggcagtgattgtcctcactttctggttctcgtcactaagaccatgctcaatgatctcgactacggactcgagatgtggcagaacagcgcagcccataagaatagcaatctgctgaacaatcttgataccagtgtgccgagcttgccaagacttcttactctgacagacagcctttaagaatggcaggagagcagggatacccaaagcagaagccaccacactaaatgctctagcagtggtatttctcacatactcatcaatgttatcaatatctggtctcatggcggcaatcatagtagcaagaccagcagctttgctaagatttgagatgatctcccggccctcaacacgagcgtagtagtcctcatcaatcagaagtggttcgatgaccacaagaatcttgtgcacaaatggacggactagctcatccagcttatacagtaccctgtcaatgaccttcactagaagatgacgctcctggtcctcaagtgttggctgcatgagcaagggtagaatcttgttgaacaatgggccagcaccaaattcccttgctttgtctgtcagctgtcgaagtgctgtcttccgctgtgggggtgtgccattcttcaccttgagcaggagcttcatgatcttcctctccttctgctcttctggagatagctgctccccctcctcctcattcagcaatgttccaaagtactggtaatcctctggcttcatgaagggcaacccaccaggcaactcctagggcacatcaaactgctgcccacgattctcctcaggaatagcatacaatggtgtgcccaatggtgtcggtgtaacgagcagctttcttgctggtgtgcgtatgggctggtatgaagcaggaggttcaagaatcttgtacccttcctgagggaacatagtatcaagctcctcatccgtaagaggcctgttccgctcctcaatgtcccgctcccaccgcaagagctggtactgctctggagtcattggaccacgagaagcaatctggccggggtgttggcgtcgcaaggttgtcaccaccaaatggcgtcggaccaggagtgtaacctgcaggcgtcgcagcaccagtgcctccaggtgtagcactacccatactagcaggagtctcatcccatctcgatctctgcttcttgggtgttggcgtgacaagcccaccaggcagcttaggagtagcatcccaagctccagaaggtgtggcacctggagtaatgccaccagctgcaggtgttgcatccgcatcggccatcctcccaggagttggtgtctcatcccaccgattccttctcaccgacggcgtcgcatccccgacacgaccaggggtggcatcccagcgcccaatcccaggagttgcatcaggagcatcccaatcggaggaggtcttcgccttcttggatccagaagcagcagaagcatcaccatcttgcgactgatcccatctattgctgcgccgactggctgctgctcaggcaaggccttcttctccttggccttctcctcttccttcttcttctgagctatatcacgcagcagctgctccttctgcttctgcaggtcattctcgcgcatggcatcagcataggtccgcacggaagggtccggggtggcctcaccggcggcgaagggatgtggcgctccggcgagatgatgcgggccagccggcggcggcgatagtcatcctcgcggtcgatgatgcgctgcgacttcttggggaggccgtcgtcctcggcggcgcgggggatgtcggcggcggcgacggcgtggccggtgtaggaggcgaggcggcgggcggcggggttgacggccgcctcggagtcgtcctcggaggcggggatggaggtgtcgtagccggcgaagcggttggggtcggagccgccgccgccgtagagatcggtgtcgaaggtgacggaggagacggccatgggcgcgccggcggccagggcctcctccatcttcttgcgctcctcctgcgcccgcgcgagctccgcgtcgatggcgtccatggcgacggcgcgggggagaggcggttagggtttggggtggagagattgcacgaggcgagaatgggggaggattgagttgtggttcaagataaaacttcgtgacacgttgtcacgttgatgcgtcatcgggcacgttcggagtaagtcccgggtccacgatacatatgtacgagtttgatacatggcacgtttcggcagagattgtatctatccatctttctaaagatttatacgttgatatcacacacagatttttaatttttagattaaaatctaatagacacaggataaaaaacaaaaaacaattaagaaaaaccataatggacactaattaccatatattcatgaaaaaaaccaaatccaatataaatttcaaattatatgcgattcaaaattacaccatctcttataaaagttatgatgtaagtttcatgaaaatattacaagaaaatatactgtaattttgagtgagacaattgaatgagagataagaaaaaaaaatcttttaagtgagatatagaaaaatcgttttggatatgcatcattctttaaaaaccggtttcactgtaatatcatttttaaacgcgagcattcgctataatattgttttctttttttattgcatttgcaaacatttttgtccaaagcatatgcaatctctctctgaccacgtactcatgatcgagaccgagccgagcgagaggagagaaaggcgagggaagggacgaccacattagtatcgtcactcactagacacgttgccaccttcccccactatccacgaaagatgtggtgaaaggaggcaggagatattgctcgagtaggttgctgcttcttgctgctcctacctctcttgtctcatggcgtggcatgccactgggcttctccctctcgccaaagaaacagacgttgtggtcgtctcccaacaaaaccttctccatctctttcacgatgactctaatggcaccacagatgacgagggagggggcgcagtcaagtaagacggcggagcaggttgtgggcaacgccgacgaggttggggagggagaagtggcagggatggtaagggaaggtggctagggctataagtgggtcagccgcgaacccacttataggtcaaaataagcggtttcgcgacttattttagcctataagtgggtttcgcgggttagccacttatacccctaaaggtggcagcgcagaagacaaatgaggtagcgcgactcagttggggaaggaagtgacgcgctcggttgggtaatgcggcggagttggtgtaatcaccccttcattcagccttctatcctagtattgctcagctcggtctcgatcgtgggtgcatggtagggctgtcaacgagccgagctcgagcgagctcgtctgcccaagctcgagctcgacacaagctcgagccgagccattgcaccttcgagcttttaggcaagctcggttcgagctcgagctcggtgccgagctcggccataagtagtataatatatattttaataataatctcttgataagtataattattttctagttaatcacactaataaaagagtagaaaatgattaaaataaatatattgtgctaacacatgctaatttattgtgtaaatagatacaaatatatatatttatctattagtttattatattaataaggtgaacatgcaatataaactatacacagccaagcttggtcaggctcggacgctcggtagaagctcgagctcggctcggttaagctcgcgagcttttgctcagactcgagttcagctcgtttggagctcgagccgagctcgaatcaagcctaggacgagtcaagctcgagctgctcgtgagtctcgagcttttttgacagccctagtgcgtggtccaaagagagagattgcatatgtggtttggttcaacaacagtaaggggcaaaaacgtccgatgaaaaaatatttgaatgaaaaatattttgtaagtaaaaaaaacaacgaaaatagcattgtgtcgaatgcttacaattaagactgacatctaagcgaatcacacgcaaaattcttaggcactaatgtgggaacgcgaagtaactaactggttaatttagtacataggagtatttaggatggattactattaaatccccaaaaccccgcaccaccgcgtctcaaaaaaaaaaaaaacgcaccaccggcgcggtcggcctcgccgatagagaggccgcgcgcggagggcgaaatgtggaagaagatcgcggccggcgcggcggagggggagacatggaaggcgctcgcggccggcgcggcggaggggtggcgcggtctgctgccgaagacggcgtccgccaccaccaagctcgtgcccgattcttctccaaagtcggcgacgccgaccgcggcgctcaacctcgtcgccgacgcggtggcggcgtggcgccgctggcttcgctctccatcagcgagtcccaccgcgaggtgtgtataccctcctcatcagctgccgtggagggcaccgccggagaaacaagcccccccgtctccgacgcagcgttggaggtgtggcgtcgttggctacgcgcgtcgacgcggcgctcgctctcctcgttcatggatcaagcttcgtcggagactcacgcgcccccaccaactccacggccgtctccaccacgtgttctcccgcctcctccattgtctgctgcacggagggcgaaggggtgtcgcactgctgcttcgtcggcatctctgtcacgcaactactcgacgtcgtcgacgaactcgcagtcccctccggagccccgcgacaggttaactcttcagaacttatataaatgatgcttcctctagcgatattttctctcatgtcctttttaatttgtactctccaaattgccccacatggttcatggcccatgtccaaatctgtggtgcaaagtcagacgggatagactaggcacccattatatgatctgatccgcaagcttccctccattgatgccctcccggagctgaacgaaggaggaaggaggaaggacgatgccgttggtgttggtgttcagagtatctctgactaaatcgcttatctctgaacaagggaaggaggaaggacgagtattgtggatttcctttgggttgggaatgggttgaatccatttttctgcacttggtttgggtttgctctgtgagtggattggattggtttggtttctgcaagctatgaattggattggaatggtttagaagtgtactgtagagacaagtggtctggggcggttctggtctggatctcagtccattagcaggcttattatcatgggtattcagttgaatgcaattatttttctgcttgatgaatcagtggtggacgcaggaaacaactgttgagtcaacagcccaggattttgttcaacattaaattccaatagagacagctagtgttaaaagagttttttctccaatatgtcctaacttaattattggtttgcagctgcagagacgacagatcattggacatatggtatactgctaaagaatttgtcaagaagtatccagttgtactctttgctcagcctacagatacacactctcagttccacagatgggtataccaggagtggttcaaacccacggtaagaagcttgcttaagtgtgtcagtgatcaccatgcttccaatttggagtttcaggagattactacggagaatgtcaagatattttgcaatgctgatgctcctcaatttattccccgaatcaaaatctactgtgagaccagaaaagcgacttatgaagggagaaagcagaattttgtgcagacaggggaactgataacagagttgataaaatcttctgtggacaatccaactgaggttttggacctgctctctgaggacataaaagataagctcagtatgttgaaaaatcctgacctgtctcatgatgctgatccacggcagtgtggagtttatatccttgtgaatcatccgtccatgctacgaagggagatgcaatctccgttttaccttgcctgttatgatttgctaatgagtgtggataaaagaattgcaaacagggcattcaggaaactgccttataagaactggcagtcaagagccctgcaacaccccctgctcaaagatcatctcatcaatagacggtctagctatggcagagacaagtatcaccaagcaagatatcatcggaatgtggcaagtcacaaaacatcatggaaatccaagtacaaagctgaagaggtcgacgagattatccaccaccactttccgatgattttaacacgtctgatgaaggtcctgtcaaagatgaagttgctgatacgccttaccctccacaacttctttggataaagaatgctgtagtgaatctactgcagtagcaaagctcaacttcttcatgtaggaaaggccatagtgatgcaactttttaacaaagctgaatctgcagataccccatgacttcttcggctaaggaaggccactgtcaagctattgctgtaacaaatctgaatctcttataccagaactggtgttgtctgccgcaccctcacaacttcttggagtggggccgaaacaaatgcaaaagcacttcatgcttattacgagtaggttttgtctcattaactttttgttctttaggccccagttatatccaattgtctgaatccctatgcaggttaatttcctgggttcatgtaacaatgcaaacccatgattttgcttcatatcaacatagctaaacatgatatttttctgtcgacatttcttctgatatgccagaaatatatatttttcttttgacttgatacaattaattttccctaggcatgtttgcaaagccttcctgtccgtgtccaagaaagactcgcattttatctaaccactgtacttacacaacggaggtctgcacctgaggtgcattaatcgctagaattactgaatgaactacggtatacagcataagacctttgttacattgtaagatctgatagcgtgacaaatgtttgtgtaaccttataatacagctaaatctttcatttaggctgatgactatgtggaacgcgtcgaatcttcaggtaccaaacttgactgcgcctggagatgagccctcaaaaacaattggtaggtacccagtagctgcgagaatggattctaatccctcgggtttaagttaatctggaaaacacaacatgatagtatctgtgttagagtgacatgccatgaacgtacaaacattacaaggaatcgcaactaacctggcaaaccgaatcacaactaacccggcaaatcattgcaagaagtttgttagcttctccacaagcaggtgtcatttggcccattacccagcaaggtgctccaacaatgcgattctcaacctgcatagttgtcaccaatggatgactcactttaatagtagaagattaagttatggacataagacataacacagtatgaagctacatccattcatttgttaatagtttacctattgacagagtaagggggtcacagagtatagcaatatatcttggagcagtatttaaaactacaggcaagaaaagaacatgaattgatgtcaactagcatgcccagttaagttaaatatgtaacagcgaggtagctgctgcagaacttgaaatctattatattattaaaggaatagaaaaaggagcctccacgttcgctctcaaggcctataaattctcacattaatcggagaaaaagaaaaaacagtgtccatatagaaatacaatttagaaatagctgaaattcagaattaaaaaataaggaatattagaaaaggagactagagtccatatagaaatacaatttagaaatagttgaaattcggaattaaaaaataaggaatattagaagaggagactagagtccatatagaaatacaattaggaaagaactaaaattcggaattaaaaataaggaatattagaagtagagcatagagtccatatagaaatacaattagaaaataatagaaattcagaattaaaaataagaaatattagaagtagagtatagagtcatatagaaatataattaagaaaaaaaatagaaattcagaattaaaaaataaggaatattagaagaggtgactagagtccatatagaaatacaattaggaaataactgaaatttggaattaaaaattaaaaataaggaatattagaagtagagtatagagttcgtataggaatttaaaactaactaaaattcggaataaaaaggagcctccacgttcgctctcatgacctaaaagttctcccattaatcggagaaaaagaaaaaatagagtccatatagaaatacaatttagaaatagctaaaattcggaattaaaaaataaggaatattagaagaggagactagagtccatatagaaatacaatttagaaatagttgaaaatcggaattaaaaaataaggaatattagaagaggagactagagtacatatagaaatacaattaggaaagaactgaaaatcggaattaaaaataaggaatattagaagtagagtatagagttcatatagaaatacaataatagaaattcggaattaaaaataaggaatattaaaagtatagtatatagtccacatagaaatacaattaataaaaaaaaagaaatttggaattaaaaaatattataagtagagtataaagtgcatataggaatttaaaactaactaaaatccgaaataaacataataaaatcaaaagtagagtttagagtccgtataaaaatacaatttacaaacaactaaaattcgaaattaagaaaaacatgggaagaagagtttaaagtcaatataggaattcaatttagaagtaactaaaatttgaaattaaaaattaaagaatattgaaagatgagtttagaatccacatagaaatacaattagaaataataaacattcagaattaaaaaaagaaatattaaaagacgagtctagagtccatataggaatatatataatttacaaataactaaattttgatattaaaaataattaataactaacacgtatataaaatacaatatgaatattacacattagtagtttcgtaaagttattgcaaaatttaaaattatgttatcattgtaatatattttaataatataatgagaaaacatatatgctattatatgagagaaaatataatgatgctagccgcgcaatttgcgcaggccaccatactagtttacctaaaagaaacaaaattagtgatataacatagatttttaagtcaatcattcgcagcagcaatagcagatacactggcaacctccactgatgcagtgccgaagaggctgatcaattaacacgtggaaggaaattgtgtgaaagactttgttcttgtttgtgattatcaaacaatcaattgcccaaatgtttgtgattaacatggtggcatgtctggctacaaagaaatgccaagattttcagacatcaacaaccgaacacacatcgagcagcccaacagattaatgaagacattcaagaatatgaattcgtgttccagcctccctgatgtagtctgcttttctgcttttttctctttctccacttctgtctaccatctatctccctcccccattttcgctttcttctcgcttgctgaaggcggctcttttacgtctgtactaatacgctgctaatcgatttgtagaccctttctccctctctaatatattgggcaatactcttgccgctttcaccttaaaaaaaagcccaaatgagccgtgaagcatccaactaaatataggttatattttttgttatcaatgagctatgaaagagtgataaatacagaagccgtaagaaatcataacattgcaataaaaggaaaatgaggtttggtcataaacaacatacagttttgtaactacgacgctgctccaacttcaacatatgctaattgcctcgcctatatatgctactccctccgtttcacaatataagtcgttctagcatcaatatgaatgtgggaaaacatcaatatgaatatggaaaatgctagaatgacttacattgtaaaacggaggaagtaccatagcttctgcttgatattaagagctaaattgcatatgccaaaataaactattactttatttcccgagaacgccgtcgccggggatggccagccgcttccatttgctcttaagatccaatgttttgacgcgccggtgcctgttaagggaggcattatagacattatatttttcttggtggctgactgggctgaaaatgagaggctatctttaatgggccgggtccacttcgttcacaaaggcgctgggcctaaaacgcgtgcagcccaagaaaacggcccactaccctcaccatctccccccaaccctcgaccgatgtggtgaagtcccaaatttctccgaacattccccacctcaccgcccaaaacccgcgcccattccaaaaccctccgccgccgccgccgccgccgcggccgccggcgaggcctccatggccaccaccacccccgccgcccgcaaaatagccggcaccgaggtccccatcccgggctcggacagggtgcggtggatcgagctcaccgtcccctccaccccgtccccctcaccggagggcgattccgatcccttcgtcctagtgcccccgcgcgccgcctcggggttccacgtcgtctcctccggcgactcgcagtgctatctcgcctggtacgccggtgtcgcctccccctcactgactcgagctccgttggcgttgggttttctcaggaattaatgctgtgttagagctagtggtagggctgagatagctggagtactatggagttttgtgcagtggagttgattttggtcttattcatctggtactttgtgggaatacactgcacactctgtattgcggtggttaactggttgctgtgatgctccgaggaacactaagtctgtgatagcttcagctaagcagtcagttagttgatttgtgcaaattcaatcctgtattatcctgcattgtaccgtcgcactgtagttgagggtaagctctagtgcatttcatcgaaaatatacatgacaccacagggcagtgagccagtgacatactggcatggtgacaaattataactggtacaaccatgatattcaggaatgttatcatctgacagaaacttatgtgctgttatcatctgacagaaagttatgtgctaatagttcagtagagttccttaacgattcaatttttagggacattttgacaaaagaaagtcctatactgtcatggttgatgagacctagacactaaatttctagggacatctgttaaactccttgcaagtacatgagttcatacatttcctacactgttgtcttccaccgatgaagaatgttgaacaaaataccttgtcagatgaccttctattagctagctaataagcaccatttagatgtatttgctttaaagctaggaatatgctatgctaaattgctaatatgacacatttactgctggatgtatttttctttctaaagaaagaagatggtttctgttgcaggaggttccatgaggaacaacaaaatgttctagaggttattgatctctgtgctttcaaggagtttccaagctctggactgcggttggtattccaggaggagctatgcccgttttccttcttatgtgcacgtgaggttggctcattaatgattcttatgtgaataaagtatcatagcatgttaactaattttctggaacatcatttatgtggtaatgcagggcggcagacgtggcacacctgtatatctgctatatgtgcttactgtttctggagttgctctcttatgccacttgcgaagcccattttcctatatctctggttcaatatttcctcaagacgatatagttgaatttaatctccaaacccaagtacagagtgctaaggttacagctgtaacagcgatgtcaggatgcctagtgattgggcgacaagatgggtcaatctgctgttacagtctgggcaagttagctctgaattcaccaggcaagcccataaatgagttatagatggctgtaccttcaaatttcttccaatgttttctgaatgttgcactgttttctgctgtaggtttcttgaatgagctccgagatgatgctgggatcggacgtttatggtctcttgtgtcaaggtacttattttttcctaacagttcacctgagaacatttgtatagcatagctccaccagaaactacatagcctaggagcattcaatgcaattttcatacattgtagattctctttacatgttaatttaggaaaaattaattacatgcccctgcagagtttgctaccctaggatttgccctccccatgttgctaacatgtggtctgaggaccacttgtcagtgatacatggagggagaaatcctagagtgctagcctatgcagggggcatataattgattcccagactgttgcaagtctgggctcagcatattttgttgtgtatggaagcccagtattgtctaaaacttgtctagtttttgtacatatgacaatacatgttgcttaccatttatgtaatatactcctccattgttttttttttgcagaacaaaggctgtgggccctgtacaagatatagtaacagctactgtaaatgaaagggaactgctgtttgttctccatctggatggaagtttgcgcatatgggatatttttaatcacactaaacttctcagttacaatgttcgctcgaatgatatcgaaggtaattcgtggtggctttatgcgcttcaggaaaggtcttatactgaattgctatttgcttatttatgttaatgttccttgtaataagtgttgcgttgacattgtcagcacatgttatgtcattgtttatcatgttaagcaacaacttacaatcaaacagttactagcacactctgctgaaggctcatatgatctgcaagcagcttgcttggtatgttcatagaataggaacaaggaatggatgcatcatgcagttgcactaaattatatcccagattcctaataattggtcgagtgtggtaatcgttggtgatggtagcctggtataaccagctaatcgagtctatttcggtgatttccatgaaatttcttgcagaacaaaataagtatggcaagtgaaaaaaactagaagattccaaaataacagaacaaaatactccctccattccaaaatataaccaacttctagtgttcaaaatttgtcccagaatgtaacaacttctctacctactctcttatctagaccaatcacaatcatatctcatttaatttctcacctacttcttcatctcaagttctcaacagatcacaaccatccctcatttaatttcacctctctccttaatccccatgaagaactccagaagtgcctgtattttggtactgagggaatagctaacatgtggggtctatttgtcagcaatagttccttttaaaggtttgatgaatcattctgaaaattgttagactgtaacagcatttgatgtacgaacactttgttagtgcatcactgaataacaactgcttctgcaactatccctttcttttggctaccctggaataaactggatatgttttacatacttaaaagaaaggatgtatttaagttgttgcttgcactaattgctgtatcttttcttgttcttgaatagtgcattttccattaaagtatttttctatctttaggtcaaccatctaggatatgggttggtgatgctgatgatgatcaagagttgatttttttggctgttctgcgtcaaggcactgtggtatgtcaagaaaaatgtctcaccactaaatttacttggtcatctggaatgcactgatttttcatgctatgccttttcacttgtcagttgactgacttataaaacacgataacagaacctataaaattatgtctgttaaaaatggatacatgctttttgtgggataacatgggggtgaaccatttcacttgtcagctgactgacttataaaacacaatgacagagcctataaaactatgtctgttaaaaatggatacatgctttttgtggagtaacatgggggcgaagttggtacatattatatgcctaatatgggtcatctagagtccaaaataaggaaaacattgcttcatgagtgatgtgttacaccttgtgtggcaaaacattggatcttaagagcaaagggaagtttgatttattaatgtcactggtagagcaagtggagttggacaaataggcgatggtgattgtggcctgaattttgcagtttgtcctggctcatgggtgatttttggaacggaaacaagaaaatggggtggatggaatacagagttgtagagttaacgatctgctaacagattattatttgtgaactcagacattgtatcaatgatgaaacatggtttttctgttgataagacagggatttcctggtcactgattatgtcatcacaatatgctaggtgctaataataatttattgttgtctttgcaataaggtttatttcctgtttccttattaaaattttccttttggtaatcccaccaatccatcccaacagtttccatttgtagatagtagatagcccgttcatcttagtcttctgtttctagatgcagcctcatataggaaactggggcattgaccttaggcttaaaccttagatatcagattttttccgatgttcatgctcatgttaaccattgtgttaattctttttacctattgttgattactccctccgtcccaaaatagatgccgctgttggattcaaaatttgtcccaaaaagcttgtcattttggagtaccttttgtcacatcaatcacctccaattcaaaattttctccatcatacccccaactacctaccatacattacttaatagagggcacctatattaatttttcctaaaccataatctttgccaaataacctagaacgacaactatattgggacggaggtagtatttgttacatgacatggtatgattgaagctgttattctttcagcattgtttttctaagtagctgattaatttacctttttacactgtgcagactggagcttgtgattgcgtttctgtatatggttttagttttggtgctggtgaaaggttcttgttttctcctgaaccttcatttttttctatacctttggtggaggtaaacaaagtcattaccgtattgcattatgatcccttatatttatatatatatggcctttttgggtttctgttctcagaagagacaattttgagtgcctgtagcaacttggtccagtgactatgctacccgctcgtagaggagcaaatatattcaacctactgatgtagagtattttgttttttctcagggaaagcttatcgacttgaaaataagcatggacaagctttggatacttaaggaagttggatcaatgctatatgaaatagtgcagtatgattgtgatacgtaagtatgctgcactgcactgttcccttatgaattgtgaaatgccgctgaccaaatagttttctgctctgactttatgactttttcatcagtgaaccagcacacagtttgtaaaactcaagcctgtatttttttttgcacttataaagattcccattaagtcgtagaaactaaaagttaggtttataattctatattgccaaaaccttgatttcttttataggtcaaacctgcttttgtttcttagccaattttaagtgcccacccttctctctctctctctctctctcaatatgtataaatcctaaacccagaagctaaactgtattaggtcactttatgagtgttcaaatatttacctaaatgtaaataactgcagtgagataatgcattcatatgtgctacaagaagtttctgtcagtgaccagttgtttcaaagctctgagaatacattggatgatttggtctggacagctgattcaatattctcatccaagaaggtaactgtaatttccttgaggttccattgttctaaattgacatgtcatgtacaccttgatgttattattcatagttctagaatgatatgtcaaatattgttatgtacagataaggtcacctattgatctatatgacttctggttcaacttgaattataaggttattgcttcacattgctgttaggtttcttgtcctctgaatggattaaactcctgacgtgtgtttgattcttaaaaatgattactatttagactacaatattcgtaaaccctataattgtcattgatacgactttttagagttagtttatcatttttgctcaattgctgcgggatatatcctttagctatatagatctcatataattattttagttctttgttggctgtgtgaagcttctcaatgttcttcagctatgtagacttcttttgtatctgtaggagcagacattcggttttatttcatctatgtttttgcggaggctacttcaaccaggagtgaatcacagttctgctctacgtgaaaccttgttggagcacaagagatttctatccgattcttatttccaatcacttacaactagtggactacggaaagaaatattatccaccatagaacaagaggtggtttcccttttctttttactcatttctttgtttctatcaggcttcatgatttctagttctagcatgtggcttgactgaattttcatatatctcattcttttagggaagttcacagactgcaagttcgactgcttatcattggaaaaagttttctgcacggtatctccacaattggtgctggaacaataggccatatgggttacttcttgatactaacagagaagtttttggtttaataagaaagggttcattttctctcttccgttgtttggagggcatggagcagtttatttatggtttgttacctttttctagtatttaataattatattaaaattattttcaactatcattatgagctattcggtaacgcctatgagcattatacatcaggttcctctgatgacctgcgcaatcttgatatccttggggtgaacccatcggataatatatctcagtctgaaatcctcattgaagttctaaggtgcatggatcatataagccatctgctggggagatctgctgctgcaatatatcatgaatccctcatcagttctgttatatcacctgatgaaattgtttctcagatcttaaagattctgggcactggtttcagtcctcagtctccctcagccctcattacattatttggaacagatgcttatgcagaaagaaggcagaccgctcacaagagtcagaggaagttttctgttgaaatgttactatcttttcgtaaattgcaatcaaagtcgacatcctggtcagcagtatttgatgtgattgagaacttcatgaagtatttgaacacaaacgtgaccatccaagagtatgagctgaagagagtttgcaatgtgaatactgcgttattggttcaagctacttcacaggtagcaagaacaatgttcgagtccacttttgatctatatctgttcctcaattatctggtctccattggtgggcaggtatgccatatttttgtattttgatatttctgtctgatgtgcatgtgtttacttaactcggccactgtgctacctctgatacgtactgctatatagttcaatattatatttcttttagggaagttcacagactgctagttcgactgccatgctattactcaaacttgctccggttggtcagaactggctaggacatctgcaaatactgattaagatgttaaagtgttcttgacttgcatcaattggaagatagtagacatataaccataagatccttgtcagacctttgtgttgtttgtggtgttaaactgtaattcaatgcttcttcatagatacacactattcttgactggtaaacgtctttcttttatctgtttcattaataagaacaatgtccaaatcaggtctccttgtcacaaaatgatattgccagaataaaactgaagttgttcccagtgattcaagatatactgggacagtggattgtcctccactttgtaggaatttcacctactacaccaccaactattgaggatttcagctatcagctttcttctctccagctaggtcagaacttacagtacattttgttgctctcttacttttacttttgttctttgatatgtattctcttgaatggggacccttcctctacagtatgtttcccgctgtattatgacaaggcaacgagtccatacagataaaaactgatatgccaatgttgggaataattaactatttgccactcttacgagtggttctaaaggatttgccactggacccacatgttggtatgctgtattcaataatggcttaaatggaaagtgggtgcacatgatacttgtctcattagagactaaaatcactagatcaattcatcttcaattgcttaattgctaatgtatcatgttacccatttcatgggaatggcttgacttgacccctaagaaacaatctgtatctctaagttagtttgtttctaatatatggaatgtatctacatggaggaactcaactaaacaatgaaactaattattatttttatctcttattgccaagtaatagcatggcaggaggcccatgggaacagtgcactgcggccacagggtactgttcacacgaaaattttctgcacttgccatgggtctgggtgcaccacaaatgattctaaaatctaaatgcaatgcacacctagcctcttatgatatatgggatcttatattcacacttggcttaatatttataatgccactttcttgtgcttttcttgataaagaaagaacacgtcctcattacttcattctcacaggaaaagctgatgacctgtctttgcacagaaagtttggctgctcttattttacattggcttgtttacttgattttccaaaatctgctgacggggatgttctctcaccctggtttcctaatccaactgagttggtcaacttggtaaggaggtttagtggctcaattatgagtgaaaatattgctggaaatgctgactgtttcttgagttccacaattaatctggcagcagttcttgttcgccatggtcaatatgaagctgctcaggtatctttcttgttggtgccccttaaattcattaaacgtttattgtttgatgtggttctaccattctatttacaataaatatgacaaccattatccttatttcttctgaaagagtcttctgggcattctcgacacacacatgaactatgtgaaagcatctcaagctgaccaggatacagatcttgcacgctcatcatgccttcatctcaatggattttgccttctggtgcttgcacgtgatgaagcaaacattgtcctgaaagaatccaaggttcatgaagctatccgatgcttcttcaggtaccaccttccacactatgcggagttgtgcactgtgatttactgcttaccagaggatattgagtctcatgaagtggtcttagtgttatagattatgtaacattgatatgttacagcaatctgaattacttgtgatgtttctagctgtattattgtataatgtgcaattcagcacttagtgagccatttctcagttttctgttaactaattattgaaaatatttgttattcgataatgctcactgccttactggttctcatagaaaagcctaagtgaccaggcattgagctgatctccagtttattttgctgcttgaattcagaaaaaaaaatgtttgatttatcttgcatcaaagtcagaaaatgtatatctgcatccttaatcgcaaattataaaaaatggctgcttcacacttctactttatgtgttatccaaggttgaacagtggacatatgattatttgcagttatggaagtttctgaaaatcctatttccctaattaatattcagtgcgtaaaggaaaggtcagtttcatttggctgcataagttatcagtatacaaatgcaatatgttagtagtaaattcggcatcacagaactagttttaccagtaaatccaatacatggtttgcaacatatgtactgatgtgagaaagaaatgaatgcggaattaggctgcatatctggtcctttagcaaacaatcaactacttgtgctatcagcttatcagcacagcagtatctttccacataaaatttcaatgatttcacctgatatgtgatattggggttcactgttctccaagcatttcaatgggatgagttcacattctctgcattataaattattccgaacttaggcaacagcaaagttttaagcatcacatcaaagcatatccgatggtcaggaactcaggaccaccttagattaataaaaaacataatcttttcttttggttgtgtggggtgtggtgggagtacaaagttcaaatagaaaattatggggaaaaggctaaaagccttgacaatccactaaaacaaaatgcttggatttgtgtacttgcctaaatttattctcttttatcaatctctttttctatattggtgattggctggctcattaatggtgttaatatgctaattactttgtaaaacagagctgcatctgggcaagaagctccaaaggctcttcagaagttctctgtggaaacagggtttcaaatctccggtgacatcattttcctagttctgcttgtattataattcacctctaccatttcctaattcttttttatttttccaggggaatgcagatcttttacagcatggaggcttcgttactatgagtgggcaatgcaaatttttgagcagcactccatgagtgaaggggcatgcgagtttgctcttggtgctcttgaacaaatagatagcatcgtcgatttagataatggaagtgaagctgaggatatccctgaaactacaactatgattaaagggcgactatgggctaatgtattcaagtacaaattggatttgaaaaattttcaagaggcgtattgcgcaataatctcaaatccagataatgatagcaagtatgtctgtttaagacgtttcatcatagttctttgtgagcttggcgagacaaaggtttgctctgtttatttactgtcttcactaaatgcattgaataatttactaatttaccagttgttttaccagatgtccatagacactcttaggctgtgttcttaactcaaagttcccaacctccactccctcgtttcccgcgcacacgcttcccaaactactaatggtgtgttttttgtaaagttttctatatgaaagttgcgtaaaaaatcatagtaatccatttttcaaggttttttttctaactaatacttaattaatcatgtgctaataagcaaccttgttttccatgcacggggggagagattcccaacctctcctcccgaacacagccttagtggtcatgacacctgtttacctaattaatctgtgggtcgttgcttggtaattgtcatgttcaagttcaaccacaattgattccgtttgcctaatgtttttacgctcttcacaaaaatagcatactatgtgtgatgttggtcggcaggctttgcactaatcattgccagttaaaaatcatataagtatgctattttgtgtattttgagttactcagttcacttcttttactgtgtgcgaaccatgttcactggatgattagagtttaaaggaccttgctatctgttgaattaggtaatttgcaatggcgagataccattcactggcttggtggaaaaagtggagcaagagctcttctggaaggttctctctctccccatcttttgaattacaaaaacttttatttgtgcaacctgtaatgcaatatattttatttaacaggctgagcgctcggatcttttgtctagaccaaatctttacaaggtcctttattcatttgaggcttataggaacaattggaggaaggctgctgcacatatgtataggtatttcgttagattgagtagagagggtaatgctggtggaacccggcaactttctcatacattgcaagagaggctgcatgctttgtctgctgctatcaatgcattgcagcttgttgatccctcattcgcttggcttgattctgtttgtgaagcggatgatcaaatctcaccaagtaaaaagccctgtaatcttttgatgaagaactgtatgttctgttactcaagcactgtttagctggacctttgtacatctcatttcgttattgactacttgtttgctgtttacagctgcttttggcacagattcagagctgtctaggttgaagttttgtgttgacattgaaattctcgaaaaggaatatacactaacagaagcactctatatgctcagcactgtaaattctagattcaacttttcaggtatatgtccccaaagtatcgtgcaaataatttaatattacttgagacttgaatatatatccaagctttggcaatcaatatctcgtgggactgcagataaccaatctattgaagcactgacggatattcttataaatgagaatatgtacgacatggtgttcaccattgtgctgaaatttcggaaggagtcaggaatgaaaaggtgaccagtttccctgtattgatagattcttgcttcttcgtgtcggcgcttctttgcattatctaacttttaatgtttcattttctcatggtagggagttggaacgtgtatttgcagcaattgcgcagcaatgctgccctaatagagtgggcaactcagggtgtgttaaactgtgtttttttggtccattctggttctctggaattgattttagtctaattggcatccactattctattgtagcaactattatatattaataataatggtgccctgccaaaaaaaataacaatgttgtattttatgaccttcttacaggaagaatttactgctgccatcttccgatgatgatgcctgtgatggcaatggtaacagtattgccatggctcatcaatcccaggggagttgccattgggagactcttgaaatatatttggtctgtgctctttgctttttcctatatttaatgtttctctgaaatgagcttcttttttacttaactttgttagagaatcttaaagtattgcatgatactccgactgttctgaaggagcttctctgtcaatttcataaactacaatttttaactctgttctgcaggagaaatacaaagatttgcatcctaggttgcctgtcattgttgcggaaacacttctttacacagaccctgagattgagctaccactttggctagtccagatgtttaaggtgatctcctgatgtatatattctaatagttacaccaactattatctgattgaccactgaccttccatttgtacctttagaccaccaaggctggtaacaggatgatttcatggggtatgtctggcacagaggcagaccctgctacattatttagattgtacataaattatggacggcacacagaagcggccaatttgctggtcgagtacttggaatcattcacatcatcggtaatagatcaacaaactcaaatatccaattgcaagatgtttgcaagcacatgttgacagttacacccttcgaaaccatcctgcagagacctgtggacgttctccaccgcaaaaagatgtcagcggcctggttcccatacactgccatcgagaggttgtggtgtcagctagaagagatgcaaaatgctggccacagcgtggatcagtgcgacaggctcaagaagttgctacatggatctctgattagtcacctgcagcaagttagtactacatctaatggcttcccctttcaattctggatttgttttctagatgtctcctgttgaccacaatctgtttgtttatgggcttccaggttgtggttgattcagatgatgtgctttcatcgcttggaggagggaaaggaatggggagccaaagcaattgagttttttttttcttttgttccttagtgagcgagcaactgagatcttgtgagccgtggattagtgtcagcttactgttgtactgtcatgtgtatgtaatagttgtatggctaatgcctgtgagccatgttcatcacctgtttctgtagacaagggcaattttccatttgtaagtccttttaacacttatgtgaaaaatgcctcgctcctttgaagagtaccaggctaccagcagacacataaagtttcctcgtgcccttttgggtttgtttgatatcgccgttctcggagctcagcgtctggagttatgagggattattttgtacggtaaattatttgataggatgttttctgaaaatttccgtcacagcgttcttatccctcgtccaatccagacagccaaaggcggtcggagactcggtgtcgtcttctcctatcaccctgggaatgactcaattacactcaaaagaatggtcctttttgcaaatctgatgtatgaaaaaaattgtgacccccatcgttcgggacatatacgtaaatgaaaaataatttatgaataaaacttttatatatgatatatgtgtttttagcgatctaaaagcaaagactgaaactttagtaaaaaaactctaaaatgaactctaaatataaagttaaaaattttctattttggctatatgcgaaaagattgggctgtgtgtcttattgcccaatctagaccgtctatttacgatcggacggtcttaaaagatccaaaggatcggcctttttttctccgaccccctgggagtcaggaggggcctttccgctaaacctccggccttttgggccttatcgccttatcgggtatgggccgctcaaacgggtatgggcaaaaggtgtgggcccgagagtgagacacgcggagctctcgctccgcaatgcaacggcatcttttctttctcccctctccccgactcatccaaccgccatcgcacacactgacacacctctccctctccctcctcaccaccaccaccacccccccgcgccccgtgtcctcgccgtcgccgtcctgtcccatcccgtgcgtccttgttaacaatgaaatttggtaagcccaaagttatcatcggcttagagttaatattggcttcaaagttctagaatcagccgataagagttaagtcgccacgatgtcatattcttggtggagtcggatcaatcaaacaaagcttatctacaagagtccgagttcaaaaaaagatgcgacatgacagtttatctattaattaggcatagtttgtaagtttccttttatctttaggaaagtgtgtttagtgtccgataaggactttatcttttcctttttagtttctttcttgtccaacaaggactagtatctctatatgggtataaatatttacacctggggtcattgtaatctatcaatctatcgatcaataaaactaccctcggtgcatcgccacccttttccctaacgtttttacttatcttccagaggaatttgggcacctgacgtaggctgcatcggctttcaatctccagcaaaggggtaagtcctacgctctgtcgggccctggtgaatctgtcggctacgttggtgttgttcaaggctgcatcgattcgatctcttggatcgctctggtttggttgatatatttgcctacttgatatctcaattctacctctaattgcattgtgtttagagacgcatcagtttagttgggactgtctcggttaggtctgatctcctgtcttagccgatatatctctacaatcacaatgtcgttataaatagatttgttatatccatcacattagatagatctatcggctcatcgagtattagattatcatatacaatctcgggctgcatcggttagattcgacctactagattgttgttgataatataagtcttgttaagccgataggttcatgctaatgttttatcgggatgctagccgataagttatctggacgttgcatcggcttgtaaggattgcatatacatataagttggatttagccgatggcaacaaaggtttcactgtttaatctaatcttatggattttatgacattggacctccagccgatgtatgctttaaccttcggatcaatatttgttctactatatcatattgttaatcgattggtttttactgggttatattgctatattatattatcatcagccgattgtctttatatcattatctacattggacatatagccgattgcttaaaccctatcgctatcggctggtaccggcatcggctattatcggctatcgactggaactactccatcggcttgtcagctgatcggctgtttgatctattatttgtatatcttgtcacttgcagaatcaaactgattggcacgcccgcatctcatcaatctttggacctgcacaggagttaagcagatctcccaggccggtgtgtttgattttttcgtcaacagtcctcctcctccctccgccgccgcgcgcgggcgcgtcgcaggtgatcttcccttccgatcccttctcgtggacgaactggttggggaggattgcttgggaggacgatggcgcgcggccgatgagtacgcgcaccacctcctccaccatcagcgtcccgtagacgaacacgcggtgggaagccgaagccgctgccgccatggggatggggtgaaggaagagcagccgacaggcggtcaggcggcaggaggaggatgaagacaactgacgagcaaggagaagcgaggaccgacgagtctatgacaggaggggacagagaccgacgattctatgacgggtggggccagattagctagcaatgtaggtctcgatggcgagatggctaacgggcgactgctagcgttcgttttttttcttttcatctttttcatctttttagtaagtttatacatctaaagtttacacatctaaaatttatccatctaaaatttatagagcgaatgtttataagtcaaaattttatatacccgatttaaattcaaattcggattcaaatattttatatataaaatatttttatacataaagtttatgcgtgcaaagtgtatggtacaaagtatatgtacatgaatgagagtattatatttttttttctaattttcttttactatttttttaaaatttatgatgtaatagaaaagtagaaaagagatatgaaaaaggaatattaggggggagggacgggtgatcgctaggaggagagggaagcgatccctctccctcaactcccggtcttgcccagcccacccactccctcctccacacgcgtcctccccctcccggctcccttccctctccccagtccccacgcgcgccccctcccttcgcttcctggtgcgcgtcccccctcccggctccctcccgttcccggcgaccccacggccccacccacgcccggcgggcctccttcctctcaatctctctctctctccctccctcctttttttttcttctccctcctcttattttttcctcctattctccacggccccacccactcccggtaggcctccttcctctcgatctctctcctgatctctccttccttttttttttcttctccctcctcttattttttttctcatattcttttcttttttttagaaaaaataaaaaaaaattgttgaattcaagactagaacccatgatcccccatggccccacccactcccggcgggcctccttcctctcgatctctctcccgatctctccgtcccttcttttttttcttctccctcctcttattttttccttctattcttttcttttttttagaaaaactaaaaataaattggtgaattcaagactataactctctcccgatctctccgtcccttcttttttttcttctccctccttctcttattttttccttctattcttttcttttttttagaaaaactaaaaataaattggtgaattcaagactagaacccatgatctcatagttcataacaaattttcctaaccaattcacgttatgacactttgtgatttgagattattgttttctttcttatatatctgttcaaattttgtgaacacaaacccgttatgttactgtagaaaatcatacattgttactatgattcggtagtaacattatcgcagaactgcagtaacacgatatagtaacacgacatgttactgcgaaaaatatgggccgttactgccaaatttataggtcgttactgcactcttttagtaacatcgtgatgaaattgcagtaatagagaacatatggtagtaacggtactactacagtaccactgcttctgcatagctaaatttttaaatctcaatcttgtgcaaaatacaagtgctaaaaaagtgcatgtgcatggtcacaagttaacacaagtgctaaaagtatttctctttgtccatacaaagatacatagtagcaagcttagtacaagtaaacttttagaattctaatctttaaacaataatatctctcacatcacaaattattttttagaaccgttttcaccataatgctttaaaacgatgttacaacgagacaatagtcatgttactacatgatgatcgagacaaaaatacttttataatattgttactgcggaaagtagtcgtgttaccacacattgatcgtcgcgttactacgtcgttccagcgagacgagaactaaaaagagataaatctcaatctgtagagagcaatatctctcacattttgtttttctaatccgtttgcactatgatgttcataaaaaaatgcttaacgaaactagatccatcatgactactttttgacgttgttactgcgagaaagttgccttatttctacacgatgatcgtcctgttactgcacgattcgtgcaagacgagaacatcaaactatcttgtttcactcctatataggggctgtgctctgtttgtttggttggtacatgttgtccctccaagtagttttttaaaaaaacaagtccttacaagtagacatgccacaccaaacaatctgacacaaaattgaagtggcacgggagcacctccctggtcaaccaacctgcgtatagtagaatgcatgtccgcaactttttttaacccagtgataccacacacgactctcttcaacaattttattttaaacgtatcgtagggagtggattcgagatgatgtcccctcgttatttgcatgccacttaattaattataaaaaaattgaaaaaaaataaaagatatattaacatgtgatatatcacttcacaaataggcaagttaaaattcaacttctacatctcgcaacgaaaataaattgaaagtgaatatacgttaactagcatgatatatactttttgtagttgataaattttttatttaatactccctccgttcataatataagacacaattacttgtttagatgttccataatataaggcgtgcatttatgcatacaattaatgagcacatcttttccattaaattattatttttttaaaatcctccacccttaagatctctaagtgggtgcatgcattatatttattacgatgatacaaattagaatgtgataataattatttcttggtctttaagttaagggtggttatgtcttatattttattttagaacggatggagtatcgtctagagatccacatatgcataacaaatatcgtataattattttacgaaatgttatatctatgtttcaaactatctgtgttggagataaatactatattaaaattgtagatctcgacaagatctgtaactttataattaatcattttttcatctaaaattattaagagtgtcaaatatacgacattgctactcaaccaatggtcccgactcctttggccctatcgtttcatcaatgattatgtttgtataaacaaaaaattaaattcgaaaacctaattttgtacattttttatcacgctttatttatagcattttgcttttgaattacgatagacatatatataaatttttacctattattgctaataagctacggttaaacacaagcatagacctaagccaaatgacggggacactcgtttgtgttagatggatctccctcctcttgagcccaacggctaaaggtggccttgacctgcgccctgatcgggggcgcgttggtgggcccccgtcacactgcgccatataaaagggggtggaggccggggcggcacacggtacgaggtttgctgccgctgccaactccactccacaaaccctaatctgatcgagagggggcgtagccagtgacgggaaacgccaccgccgcgccacgcctcatcatcgggacatctatgaccgccactgccgcaaccgtcatcgccgtcgacctcaccagcgccgcatccacgacaaccgcgcgacgacgacgacgatgtccggcgcctcttccttcatgaacacctcaaccggtcggtatctaaaccctctcccatccatctacaatgtcgttcatcaatcccaaatagaaccacccgactagatctaacctaggtgatcctagtgcaaagtctaacaatggtatcagagcaccctagcgcttagatcggtttggggaaagaaacccacagaggaaaagaaagaaagaaatgcaaacgatccaacgtatcgaaaagaaaaccctaaccctaattcttacctcgtcgccggccgtcgttgacgccggcacggaggggagaggggcaaagaggcaccgccgaggagccactcgatggccgtgcgcgcacccgtgggtgcacgcgcacgccggtgagggagcccgcggcggcgccgccatctctttcgccgctgtcgctgttctctctctctcacttcacacgggtggagggtgagagacggtggggggagaagagaagagaaaagcacgccggccatggcgcggcggcgcgaaggttgccgtcgacggcgacgctgctccgtgcggtcgcgcgcgagagagagaaagaagagaagctagggttcagtggcggctggggggggtcgacggttttgtttgcccgatctccccgcccggctgtccgatcgaaccctagcggatcggacggccgacggttgggccaaaaacggcccaagaggggcgcgcgtgcgcggcggtttcccggcccaggcccacgttgcggcctgggggataaaggggagcgcccgcgcgcgccaaaatagggccgtgggccgccggcaaaagttcaaattaggtccctcggggggccgaaaatgatgaaaagagggacagtagcaaattttccttttattttgtataattttcatgcaaatttcaatagaattttgaatagttttttgcatgttttacctctgtttaaatttgaaccaacgggagaatttttacagagagtgaattacagagtttctgctactgttcatatgaattttatatagtttttccgctgcaaatagataaaattgatgaaaattagtgtttctaaaattaaatttcgaaccaacaggagaatttaattttaggaacattaattatgtgctatgatgttgtaattttctgaccaacgttgataattgcaatgttatagttatggctatgtgttatgtctaattctgcccaacggtgatgtaggcttaatgcatactattttaatgttaattttgttctcacagtacatgattatttcaggtggctactccttgatgggttgcattaaagatattccgaccctgaaaggagataactacgcagaatggaaaagaaaactcgaccttgcttttatcttgggaaaggtggactgggtgttgactaccccatgtcctatggaacctgctgcacttgtcagaggtgcaaatgagtcagatgctgactggcaaaagagacagagggacaatggtcctctcgtcatgtcatatgacattgaacaaaagaaatggtccttagccaacaagaaatgtttggctgtggtaaagaacacgattgagccaacattattgggctcaattccagagtgtgacgctgtctcagagtaccttgaaagaataaagagtcagtttaatggctcttcaaagacttatgctacacagctgatcaagcagcttgtgacagaaaggtaccatggaggtggtgttagagaccacatacttagaatgagcaacatggcttccaagttgaagccaatggatttgggcataacagatgactttctggtccatctggttatggcctcattgccaaagcagtttgacaattttattgtcaactacgatataagtctagagaaatggaactttgaaaagctcattgctaattgtgtgcaagagaaggagagaatcaaagaatcaaatggtggttcaattaattatgttaaagataacaagaaaaagaaccacaagtctcccacctcaaaagctaaacagtctcagcatctgcctcagcaacaacagttcgctgttgagaaagatcagtgtctccactgcaagaagacatgacattacaagaaagactgtcctgacttcctgaaaatgatcatggcaaggaaatgtgaaaacattattacatttgtaaatgaatctcactatgttggttactctagatccacatggtggattgattcacgaggactacgcaaagaagagaaagctccattagagttgccaatggagttgaagaaaaagttgaagctgttggagatctacttctagagctcgcgaatggcttcgcacttttacttcgagatgtcttttatgtaccttctttgcaaagaaacttaataagtgtatcgaaattggatttcgatggatatgattgccgctttggaagtggcaaatgtgaactatggtataataatgaatgcattggtcttgctgtgttgcgagacgagctttatttgttatctctttctgagaatgtgaatgttgtgtcctcgttgacaaaagaaaacaagaaaagaaagcgaactcccgatgtctcatcgaaattatggcactgtcgtttgggccatatttcgagggggagaattgagagactagttaagaattgagttctcagacttagaacaatgcatagaatgcattaaaggaaaatttgtaaagagcatcaaaaagggtgcaaaacgaagcgcaggaattttagagatcattcacacagatatctgtggtccatttcccgtgaaaagtgtggatggctatgactcgttcataacattcacagacgattactcccgttgtggttatatttatccaattaaagagtgatcagaagcattggataaatttaagatattcaaagctgaagttgaaaatcagcatgatataaagattaaagtagtaagatctgaccgtgggggggagtactatggtcgacatacgccttatgggcaagtccctagaccttttgcaaggttcttgttagagaatggaatagtagcccagtattcaacaccgggcaaacctcaacagaatggggtagctgaaaggcgtaaccgtacccttatggatatggtgcgcagcatgatgagctactccaccctaccactgggtttatggatggaggcgttaaaaaccgccattcatattctcaacagagttccaagcaaatcggtacccaaaacaccgtatgagctatggacaggaagagtaccctcgctagctcacctccgtgtgtgggggagtcctgtagaggctaaagtatttaacccaaatattgggaagttggaccccaaaacagtaagctgccattttattggctatcctgaaagatcaaagggttatcgtttctattgtccaaatagttatacaaagtttgtagaaacgagacacgctgtcttcttggaagacgaaatgattagggggagctcggtagttcgagaaattgatcttgaggagagacgggggtctgtacccgctccgtcgactcaggaacctttcttctctctacctgttgatgttgtgcttgcaatgcctgtcgttgcggtaccggcacctgttgttacccctcctgtggcaacaatgaataaaagtgaggaacctgttctacaggattcaacagaaattgttgccacaccagaggaggagctgcaacagcctcaaatagataatgtgccagtacaggagactcaacaagagcctcagggacaggatgtgccaaatgtgcaggcccctagaaggtctgaaagagtcagaagatcggctatccgtgatgactataaagtttataatatagaagagttgcatatggaggatgatcccacctcatatgaagaggccatgagaagcgcacgctcatctgaatggttggaagccatgaaagatgaaatgaaatcaatgaaactaaacgatgtttgggatttagaagaaattcctaaaggagccaaaatagtaggctgtaagtgggtctacaaaaccaaatatgactccagagggaatatagaaaagtttaaagcgtgacttgtggcaaaaggcttcacgcaccgagaggggattgattacaatgagacattttctccagtctcttgtaaagattccttcaggattataatggcactggtggcacattatgatttggaattacatcagatggatgtaaaaatggcatttctaaatggagatttggaggaaaaagtatacatggcacaaccgaaaggttttgtcatgaaaggaaatgaaaatatgggatgccgtctaaagagatccatttatggattaaagcaagcttcgagacagtggtacttgaagtttgatgggacaataaagaaatttgggtttcaagagaatgtcgaggacaactgtatctattcaaagtttaagaatggaagatttattttcctaattctgtatgtggatgacattctactggctagtagtgatgtcagtctactgcagaaacaaagaaattcttgtcctcaaattttgacatgaaagacctcggtgaggcttcatatgttttgggcatagagattcactgaaatagagcaaagtatgcattgggactttctcaaaaggcatatatagaaaaggtgttgaagaaattcaatatgtacagatgcaatgctacacctgctcctatagtgaaaggcaaaaagtatggggcatcacaatgtcgcagaaatcagtatgagctcaatgaaatgaaaacaaagccatatgcgtcagctgtaggaagcctacagtacgcgcaagtgtgcacacgacctgacttggcatttgttaccaggttacttggcagatttcaaagtaatccaggcccagagcactggaaattggtaaagaaagtcttgcgttatttgcaaggaacaaaaggcctcatgctgtcttacagaagatcagaatcactccagatagtggggtattcagattctgactttgcaaaagataatacaaagtcaacatcgggatacgtgtttaccctgccaggaggagctatttcatggaaaagctcaaaacagactattattgcagggtctactatgtatgccgagtttatagcatgctatgaggcaacggggcaggtgaactggctaaaaaagttcatacgcggtttaaaggtggttgacagtattgagaaaccactaaagttatactgcgacaacgaacccgcagtaatgtacgctcacaacaatcagtcaagtggtgctgccaaacacattgacataaagtactatgttgtgaaggacaaagtccgggatcaaacaatcagtctcgagtacattagaacagaaaggatgctcgcggatccgctcacgaaaggcctaccacccaatgtgttcaaggaacatgtagccggcatgggtttaagggaagccttatgaatcctgtactacagggcccaaaagttaaagtatctatttctaaatagagatgtgtatagtggctgtcgaatccatcggtgattgaccgtgacgatgaaacatgctctatgtgcaaatctgtgatgaaatataaaaaggctaaaagaaatagtgagatcaagggggagaatgttagatggatctccctccccttgagccgtgggctcaagggggccttgacccgcgccctgatcgagggcgcccagcccaatggctggtgggcccccgtcacactgcgccatataaaagggggtggaggccggggcggcacacggtacgaggtttgctgccgctgccaactccaccccacaaaccctaatccgatcgagagggggcgccgccagtgacgggaaacgccaccgccgcgccacgcctcatcgtcgggacatctacgaccgccactgccgcagccgtcatcgccgtcgacctcaccggcgccgcatccacgacaaccgcgcgacgacgacgacgatgtccggcgcctcttccatcacgaacacttcaaccggtcggtatctaaaccctctccctttcatctacaatgtcgttcatcaatcccaaatagaaccacccgactagatctaacctaggtgatcctagtgcaaagtctaacagtttgtgcatgaagaggcaaaacttctaagcaatgctggtaaaaaaaaatcaaaagtggtgttcgagcgacaagacaagtcatagctatccttgccaatagccgtgtttagttttccccttattcccaactttccatcacatcatatcatatcaaaaactttcctacacacataaactttcaacttttttttccaaactcccaactttcttcaaactttcaacttttttcaggaactaaacacacccaatgtgttaatacaagataaattgaaataacacaaggaaaatagttactgtggaggccaggctacctctcccatcatacttctacatgaacaaattgatggttcttttgtcagtgcacagtgtacaccttaaatattggaattgacaagtctccactcctcctgtgcgtgtccaccataatgagctgctactgctcgtgcaatcaacgtaccaagaatcaactcaattgtgctaagctttaatagggtttcatttgcaaatatgcaagtgcacaggataacaaagggtggcataatagggtttcatttgcaaaagcagcatttagcaaacatttgagaatttaataaaacagttaagtaataaataatattaatccaacgctatacaacataccctgttgtataggcccaaccattctgaacaaccatcccggctgcacagttctatctccaaaccaggaatgtaccattccaaaccaggagctaatcaaattattaccaattatagcatcattaactatggtgagaagtgtgaaactaatcacgaaagacattgttagacccgcccataaccgcgggcacggctattcgaatagttttactctgatcagaggtgtaccactgtacccacaagacacaaccccacatcatgtcaccatgtgcttcaataccaccacggtacctcagaaaggagttgtgacaataccccttgcataacacaatccaatacagcgcacctttcctggatcataatcacccccttataaacaaggcatggactccccagcgacccccgtgggcttatctccgccacttctcagtctgatgccccgcaatgaaccatgctatacaaaagataaagccgttgcccatgctggcttgtggttggcacggttaatgtttcacaaccgaaactcgtgaaccggtccttaattgtcatgagcacgaccatcaaaaccatgtgctcacaacccaccatttccaggttttagttggcacattaattaattaaccaatcacgattgaccatcgtgaactatcatttagccatcattaaataatagtgagtcataagttatcccaatagtgagctaatgtttctaagaagggctaagcaattatatctaatatctagttgaaccaatataaataaagctcaactagtcaaattataataacccaaaggatcaaggaataaagtaatcaagaacaaaaaggctataacaatgaataggttaattccacccaatgacattcaaaaataaatgcaatagttgaaaagaaacaatagctttaaacaggatcaacatgctcaaagggttgtttgggatctgtgtgacttgccttgctggccttggaactcttcaaactcttctccggcgaaaacggactctccggaaacgacggaatctaagcagaaaagagcaaaatcaccaaaacagcacataaacaagcatgaacagtacatgtggatatttttaatatgtagacctcaattttagaaaaatttagagacttgaaccaactaaatcggagctaagatgaattagttatgaatttttgaagattaaatcggattaaaacacttaaattgattttaattgaattatgacgcaataatgaattatttttgaaaaggaaaaggaggattattgcgtcagcgggctagggtttcggtggaccgggcgcacggcggcggttcacgcgaacggacggccgagatcgatccatccaaaatggacggccgagatcgatcggtccacgaccggctcacggcggacagccacgatgacgtcagcgatgacgtcaccaccggcggcggcggctcggcggctcgggcttgcaagctcgccggcgaacgacggcacggcggcgcgaacagaaggcaccaacgggtagcggacggcacggcgaactcaccggcgaccaaagcgacggcggaagaccaacggacggcgacggcgacgaagaagaagcggcggcgctcttcggcttgacgacggcgacggtgctccggcggtctacagcgacagcgaaggggcggacgaggacggcgacgacttggcgaccacgacggcggtcttcccgagcgacggcgacgtctggaacggcggcggcgcacggctggagcgacggcgacgacggcggcgctagggcacacggcgctaaggcgtttccgacgacgagaggcgaaggcgaaggtggcggcgggtagaggagacaccggggatccttttaaaggggctaggagacggcggcgaaggcccacggcggccggcgacgagaaggaaagttcgggaaaaacgaatccgaaacaaactcgaatccacgaatttccaaacgattttagccggtgtttccaaaggagaaaaggtagaggagatcgagaagatcatttcccctctattgattcggctggaaacggaaaggggcggccggattggaaagcggcggcggcggcgcgaaactagggtttcggccggaggaagacgacgggcctgacaggtgggccccacctgtcagcgggcggacgcgcgcgcgcggcggcggactgggccggctgggccgaggagagagagaagagaggttttgggccgactttcggcccaaagccaaaagaagacttttaaaacctttttcaatttaaattatttcttaaatgcaattccatttattaaaaatacttcctcagctcaaataaatcccagaaaaatctaggaattatagaattaagcaaagtatttaataaaattttatctggccccattttatattggaatttattaattaaaattagatcttctcttctaggcttttacaataaattctaaaaattccatttaaacaacaatttatatattttgaattttcagggtgtgacaaggaggactggaggagggggcgcgggcgctggggaggcggggccgggcgcggattaggtgggaggtggagccgctcgtgatcggggggaggtggagccgctcgtgatcggggaagggagggatgggtttggtagttgggctgggggtgttgaatagttattctaagggagaggtgtataacagagagggatgggcttggtagttgggctgatggggggagggggtgtagaatagttattctaagagagaggtgtataacagagctactatatatacacccctcccttagaaccctccttccctcccccacgcgcgccctcccttagaacaatccttccctcccccacgcgcgccccttccctcccccacgcgtgtgcgcgctcgccctctcccgatctcttctctcttcttatttttcctcctcctcccgatctcttcccttttcttttctcttttttagaaaaattaaaaataaattggtgaatccaagactgaacccatgatcttcttttctcttttttagaaaaattaaaaatgaattggtgaatccaagactagaacccatgacctcatggttcataacaaactctcctaaccaattcaccctataacacaatgtgatataagattattgtttgctttatctatatatttgttcaaattttctgaacacaaacccgttatgttattgtaggaaccataccttgttactattattcgatagtaacattattgcagaagtgcagtaacatgatacgtttctgcgaaatttataggtcgttactacgaaatttataggtcgttactacactttttgcagtaacatcatgattaaaattgcagcagcagagaacatatggtagtaacggtactactacagtaccactgcttgtgcacaggtaaatttttaaatctcaatcttgtgcaaaatacaagtgctaaaaaaacgcatgtgcatggtcacaagttaatacaaagtgctaaaagtacttctctttgtccatacaaaaatacataatagcaagtttagtacaaagtaaacttttagaattctaatctttaaacgataatatctctcacatcggatattattttttagaaccgttttcaccataatgctttaaaacgacgttacaatacaatagtcctgttactacacggtgatcgagacaaaaatgcttttataacattgtttactgcggaaagtagtcgtgtttctgcacattgatcgttacgttactacgccgttcaaataagacgagaactaaaaaaaaataaatctcaatctttacagagcaatatctctcacgttatatagtatttttctaatccgtctgcaccatgatgttcataaaaaagtgcttaataaaactagatccatcatgactatttttcgatgttgttactgcgagaaagttgtcctgttactgcacgatgaccgttatgttactgcggaattcctgcgagacgtgaacagcaaattggtgggcggggagggagtcaatgggcgggtttgacaggcgggagggggctttgggccctagggagggtgggggaggtaggattggcccatgggaggggggtgtagaatagattcacaatatatatatatatatatatatatatatatatatatatatatatatatatatatatgctctattatacacccccgccttagaataactattctacaccccccatcgctcctctcctcccacctgcgagacgtgaacagcaaagtggtgggcggggagggagtcaatgggcgggtttgaccggcgagagggggctttgggccctagggagggtggcgtgaacccatatgtgtgtgtgtgtgtgtgtgtgtgtgtgtgtgtgtgtgtgtgtgtgtgtgtgtgtgtgtgtgtgtgtgtatatatatatatatatatatatatatatatatatatatataacaaagagacggaggaaaacaacggaaaaaaagagaaaaaaaaaggcgagtggaaaaaggaaaaaggagccgacgacgggaaaaaaaggaaaaagcggtgaaaatagcgaaaatgagaaaaaaaaagagactgatgaaaaaaaatatgtcagaaaccttacgtattgtgaaaaataatgtgaaggaagatgattggatattgatttgtagaattcaataaattatagatgatgttgcatacttgcataaattttctatataattattgctagtggatgatgagatgtcatgtttacattgtgagcattaggattagtggttataactttatagtaagataggattaaccttatcctttaaggtggaatattttaagaaacgctacatttaaacttatattgtctatttagctaatatatatcctatcttcctatatagttggtacccactaagaggcatttacttctataaagtaagacatgcaagaagtcatatcatcaacaattttaagccatcagatcatattagtacaaagataacaaccgttggattaagaagctacttattcatccaattcaatcatttattagttatccattcacctccctttgctccacctcatagtcacacatagcactattacatattttgtgcatcacacaatgttttcctaatacaactcaaattattgtttaatatgtgtgttttgtttaattatgcatgataagatatcatataattattaggtatcgttatctgaatccatttttagaaaaaacttgagtgaaatagagagttgcaaattgtctaactacaacgatatccatattgcacatgaaaataatattcatatgttataacagtacacaatgatgtttggaaaaataaagaatgaattatattgtaataacataaagcatatataaatccacattatcatatattttgtatatacatagagttgcacctaaccattttaaactatgattttgtttgacgatgaaactacaaaacccgcgacaaagacgcggggtgccaactagtttatacataataattgtaaacaataatatgggatatttgtatgcacacattggccgcattttcaacatgtcttaattatggaaattataaagcattttgtgtttatgtaaccggttaatctatcatctatgccgtctataggtggtgttcttttctcctgaagatgaatattaagtttttttacacaaaacgaggtggtattaacgtatgattgattaattttaattattacaaacttgaaaaaaatattaatatccaatcaactttttttagtgtgcatacaaatatctggtaaaaaacatattaatatgatattttagagcaattttcatatagaaaattttcgcatgaaacacacagtttagtagtttcaaaagcgtgcgacgaaaatattaatttctcatccaactcttgttagagaaaagaacgggatgtgccataaaccactacatcctaaaactcaacatgaaaacatacaacatcatcatccagtagtaatcgctacgttttaaacctcatacaagcatactatgttatctataatttattatattttaaagctttaaaatgcaaacatgttaaatcattatcccacatcatctaaataatatttcaatatatttgcacataattttctacaatacatgattcctatatagttcgttccaacttagtgtgtgtgttttacctcaattgttcctatcccttagataagataatcaatctatggttcaaattatctcacttatttccttctctcatgaagcgacatcacattactcttgcttttagattattaatctatatactatttaaattatcataaaccacgtcaacttactggttttatagctttttccaatgatcgatcttatataagcttatgttgtatagatatcttacacgctatctctacttgttgacgaaaaaatcgaacacaccgacctgggagatctgcttaactcctgtgcaggtccaaagattgttgagatgcgagcgtgccagttagtttgattctgcaactgacaagatatataaacagcagatcaatgagccgatcggctaacaagccgatggagtgattccagccgatgccgattccagccgatagccgatgccagctgatagcgatagggttctgagctatcggctatatgtacaatgtagataatgatatgaaggcaatcggctgatgataatataatatagcaatataatctagtccaatagaaaccaatcggctagcaatgatatagtagaacaagtattgatccgaaggttaaagcatacatcggctggaggtccgatgtcataaaatccacaagattagattaaacagtaaaatctttgttgcgatcggctaaatccaatatgtatacaatccttataaaccgatgcaatgtccagataactcatcagctgaaaccccgatgaaaccattattggcagtcaaaaagcaggctagagattatggttctaagcacgacttagtagatcaaacttaactgatgcagcactaagtatgaaaagaaacacaatatctagacaatcaagcctgtcggtgacatgggaccgggagtatcatgacttagagacttgaggcagacacgatcacccacgtggcctaaccccctcgggggggtcgggcccgagggtgatacggccgctcttctctttgtctccccgaggggtcggaccgctcccgtttcggccccgagggctggggtgccccgaccccttgtggattttacgccgcgtgtatgggttaggtgagcgcagcggcgctcacctaaccgcatttattgcggtttggatgagcgcgtcacgccgcatgtaacgcagtgcagcgcgctcgttcatccggtctgtgatcagtcacagaccggtcaaatcgtgggttaggtggcgacaggcggtctgacgcacgcctcgccccatcccgtcaggacgagagcctccaagcactcgtccctagctggagccggcgtgttagctcctggagatggcacgttggttccggtcagatatatgccaggcttcatcctaaccattacaggcaagatattgtatgaagaagggcgaacatgcagattgttaaactgacacgtggtggacaagaatgaccgatttgtgaccggtctgacaatggtcatgtcgtcagcagacagccatgttcccacgtcgcgcctgcttccggtggaagtggaggtaggtatgggccgtcccatcagaaggtcattcggacggcagccatacagatctccgtccattaatgaagaaaagtcaagttggagggaagagaggataagtccccacaaaaaagagagagatggtgcatgtggtatccccttgaggtataaaaggaggaccttgcccacttagaaggggggggatgatttttaggagaaaaaaggatcccggaacgatcgggggctggctcgcactttgtagcttcttcatacacagatccaccaaaacacaggagtagggtattacgcttctcagcggcccgaacctgtatacatcgcccgtgtcttgtgtgttttcactctcgcgaaccttccacactcagaccaggagcttagaatctcacccagggcccccggccgaaccggcaaaggggggcctgcgcggtctcccggtgaggagccccacgctccgtcaaagccgttgactgattttcagggtggtagatgcctaggctaatctaatctagcaggcgatttagccgataccggtagaaaccctaaagcgagagacggccgatagagctaaattgagatgctaggactagattaacatagacatatgataaatagccaggcaaatatattatccaaaccagagtaatccaggaggtcaaatgtattgatgtagccttgaacgacaccgacgtagacgatacaattgcctggaccggtagaacattggacttatccattcgccagagatcgaagacgatgcagccccgcgtcgagtgccaagttccgccggaacgtaaaaacaaaagtagaagtaaaaagggtggcgatgcgccgaattgtattgatcgtgaagataattacatagaccccgggtgtacatatttatacccatgggttgatacaagtccttgtcggacaagaaagaaactatcctaaagataaaaagaaaagataaagtccttatcggacactaaacacactttcctaaagataaaaggaaactaacaaactatgcctaattaatagataaactgccatgccgcatccttcttgaactcgaactcttctagataagcttcctttgattgatctgactccaccaagaacacgacagcatggcaacttgatgactcccatcggctgtttcctccaatcggctgattccaatactctaaagccgatattgactctaagctgatgataacttcgggctttaccaaattttactgttaacactactattatcatattaaactcttgcatcaatgtgcgaagtttcatctagttaacaataaggatttgtgttgagtttgtgcaatcattgagtgctagagtgaagaagaagataaattaggcatgagaagtgtgtattttgagcctacttatatgtgaatatatattaaaaatagtaataatgcaaataagtattttatatatatatatatatatatatatatatatattctcaaaacatatggtttaaaacaaattaagacacttggagtttttttttgtttacgcatgctctaaaacatactccctccatttcatcttataagtcgtttgactttttcctaatcaaactttgttaagttcgatcaagtttataaaaaaattagcaacatataaaatagcaaattagtttaattaaatctaacatgtaataaattttcataatatgtttgttctgtgttgaaaatattaatatgtttttctataaacttgatcaaatttgaagaaatttgactaggaaaaaagttaaacgaaagagcagttttcttgtgaaatttgctaaaataggattattaaaattcattcgtagatctgtaggagctgaatcgctggcttgattgatcggcgatgatttgttgacatggtgtttgatgagttatgaatacagtcgcgaccgccactactacacgctgcgcaacatcgtcgacatgtcccgggtcttccacccgtgcccctcaccagcgtcggcggctactggcggagcgcatgacgtgatggagtatggtagcctgcctcggcataccatgagcttctgccctgcctccctctccaggtggtttggcggcacggagcggatgaggttcgtgctcctcggcggcaaccacaacatggtggtcaccgctgaccagagtagccgcaccgtcctctatgacctcggcaagtacgccattcgcaccctgtctgccttcgtcttcccgacctatctcagggcttcggattcgcttgactccatcaccgccagcatctcggcgacgacctctacatccttcgatacaacccggtcgctggtggttgctaccatgggctcatctacggcggcgacgaggaatggcgctgttgtggtctctcgccgccttcctttcgacctgattcctacgctgtggtcggcgacacagacatattttttttcgtgaacacgcaaaagctttgcacattaatgtattaggaaaagagtagcatacatcggtaacacgtcaaggcgattacaaagaggtaggaaggtacaatatggtgctggagagctacctaaactcagtgtgactcctaagaggaatgtgagagaaacgaagctaagctatgtgactgacagcctcccaataggattggtcgttgcctcaacccatagtcgcccttcttgcataatccgcttcaccatcgttggcactgtgatagaacaccgtcaaaaacacgacattgctttctaaccacaccgtcaaaaacacgacattgctttctaaccacaagtgccagacaaccaggaggataaaggtgttgaaaaccttttagaattatataatttacttgttttttttatattacattatgggacatacgagtactattgttttacttggaaatattatccatagccaaaatagccctggctaaatcacatgccgtcccccttcctcccttcccacccgccgtgctccccggacgccgccgcacttgttaggaatcaagggaactcacgcgaacacagtggacacaaatcacacttacacgtgaagagcacaagaaagaagaacacagcacattgagtattttgtggcacaagcacgcaactagtgccttttctcttgctaattttattcacacttaaacaaatgattacaatgagcagctatttataaccctcgcatactactaatcgcatatacacacacgaagctggttgttccgattctcaagctacacacgacgcccacgtccggtttacttggtcacaactccacaagtatcgcaactgcttgactcagtccgcatctccactactgagtcctcgccgacgtcgttgctcacaccaaccaactaacctgcaactaactaatacatgcaagactaattcaccacataatcctgagactaatcctaatctgcacgcacgcactacttggctggcaatctactttaagcactccaccacattttgtgcttcacgggagattagctctataatgccacaaccactaatgtgtgcagctgacaacttaattagtctactcctacaactaaatgtgatgccatgcaacaaaataaacatgatcacctagtacaacaagattatttctaacagcactcatccccttccttatctgccgccacaccagagctgggttcgtaggcagccaactccgccgcgccgcacccctctactccatcttcctccgcgccatccccttcccgtcgtctttccgccgccggcgactctccgattcgctcgcggccggagtagcggttcggcggctccctccctccctctctactaaggtgagatttgcaacgagaaagatcgtttggcttcgctaggctccttcctgcctccgatgggatatatttttttttattcgctccgatgggaagttttagtccaaaacgaacacaaataaatgcaaccggtggtctatctctaaccctaacccaaatatgcgggagacaccgatctagatagatctcccaacagttgttcgtggtgggggagaagaagagctagggcaatccaatcaatctttagtaagattccttaatttggggggcgatgagtattcgtcggtttgtttatctggtgttggaggagtttgctccccgccgcagcaactacacactgcgcaacatagacatggagcgcttcttcctgccacgtccatccccggtgccattcgtggcgtcaggcaccgacgcggcggagtatgcgagcctgccttgcccagccatgaccttctaccctccattctccaagttgcctgggaaacagcagatggaattcttgctccttggaggcaatcataacatggtggtcgccgccgaccagacttgccgcactgtcctctatgaccccggcgagcacgccgtccgcaccttgcccgcccttccctaccaactggaattgcctactgcttccgtcactgttggggacgacctctatatccttgaccatgttgaggtcggaaacgtcccctgcttccatgggctcatttacgaggatagattaaatgaggactggtgctgctgcgctctcccgccgccgccgccactgctgtcccacaagtctgacttccaagtcgactcctatgcggtggttggtgacacggacatctggatatccacgcacgatagtggcatctattgcttcaacacagtgagccatgtgtggagcacagtggccaccggctggaccctgccatttgttggtctcgccgagtattgccaggagcacggcctttggtttggcctctcacacactagagacaggaggagcttggtcctctccgctttggaccttgatagcagccatctgccagtgcttctcagccttcctctggagttcacgccacccgatgccctcaagcttgtcagctcataccttgtgaacctaggctctgccaagttctgcatcgccaggttattccagactgatgaggaccagcgtgatggcgaggagctgtttgcagtgttgaccgccgtcgaggtggaacgctgcgatgacgacgatgctggtgccaatggtggagggctccgcatgctgaagcacaggtctgagatgtacaagctcaccagtgaaatgatgtattgggtgctttagtcgtgtgggactttagttattgccaagggcctcaaattactgaaccaaagcaatgatttgaggccctactttactcttcctgagctagatcaggaaggataaaggttttgtcatgttcaatagcaggtctgctgtatcgacacaataatacgataaaatggttttaaagggaatcatatgaatatgtgtccgatcttttgagttgtgtcgttgttgttatttgtaatcattttgtgatcagatatggcaataaatttatttcgtttcagtcaattttctgattgttagatttatcctgggattcctgctatttgagggttctcaaaggagaggacagctctcaaagcggagtgctttatgtagttaataccatgtgttgccagtcagtggtgagtatgggggttcttatagtgtttggtgaggcttccatgtcttctcctacacgttcagctttctgccagcagtgagtgatgagtctagtctgactgcatcttcttgcactttgacaagtgtggtcatgctgtgtgtgattttgggttggtttgtcccctatggttatggggtagggtgttgattttgtagtcatgctgagagagtgaaggaggaaggcggtctcgccctgtttagatgggactaaaacttttaagtccctatcacatcggatgtttgaaaattaattataaatattaaacgtagactattaataaaacccatccataatcttggactaatttgcgagacgaatctaatgagcctaattaatccatgattagcctatgtgatgctacagtaaacattctctaattatagattaattaggcttaaaaaatttgtctcgtgaattagcttttatttatgtaattagttttgtaagtagtctatatttaatactctaaattagtgtctaaagacagggactaaagttaagtccctggatctaaacaccacctcagtctctctggttggcggtagaaagaagttttctccaaagctagggaattagatagagaacggtgttagagagacggagggagttttttttttttttttttttttttttttttttttttttggtgtgtgtgtgtgcgtgtgcgtgtgtgtttgtttgtttgttgagtgtgcacagatgcttcctctgtcctccaagagtttatgataccggatggcaccagcaaaggtggttgcagcagcttgctgtgatggttgccgtagggaccctagggggagagaagaagcaggcctggtggcagtgggaggtcaccactagagggtaggaccaagctgaccatggcagcagcagcggttgtggcttcctaggtcctgggaggcttgcggtgagtatctcacggcagttcctctcctctggcagcaaagctcctcagcaagaaggggaatgtaacgcctgcttgaaggtatctaaaatgcgcttcactaatcactcttctcatgattattgttattcctattgcagtattaatttgcagactcaaaacaatggatttttgcccagttggttggtcatccctttatgacttgttggtgtttgatctgtccagttgactgaagagttgtcttgatgtgtctggaacgttacaaatgtttgttatattacatggcttgccgatatgtgcttgaattcaacagttgctgaatcaatcaaatacaattgagctaaagtttgctctgcctgcaggtactgtctgcttattaggttatattttgtggttgctccaattcctatattgatctaacttttctttggcaggtacttgtcgatgcatggtagcgaataattttcatattttcttccatgctctcgcggggaaaaggatgttaaccaattggcagggactatgattaggtgtgcagagaatatgatgtacacttctgctttatttggaatgcacttattatctagttatatgcatggcacctagacacataaaaactctgctgcctcttagcatgtgtcaaaggtatgttcattagcccttttttcttaggacattaaactcatattatctggttttcttggaacaatcattaacaaattgtactctgatttgatattcaattaaggtgtggttcatgcaaaagaaagctaggtagaggaatttaagtatacaggtttatatttacatggtttttatcattttattttctacagcaaagaggctctagagtgatgctcttcacatattattaggctatcttaacaaaaaagcatcttaacacaacgcttcctcgagtatgtcgatttgtagttcggtcagttcactcaaattcactgacttcatgcatggggactcgaccatcaatcctttcttgcgacgagctgtgactgggtgctctggaacctccttaaaagaaggggcagaggggtaaggtaatcggagtaattacccggtattaagatataagcataataaactgatgcatctgaagacacaatcataagtatgtttttttcttacttttcaattttcctcgtgctgtcctcaatgctatgttctcctttttcccgagaggagaatgagcttatgttttaaagagttgaagatgttttgattcacgttttataagggaactatgttcctgcctcctgatgtttcaacatatttcttgctaaaatgcatgcagaacaactgtttcacttgcagtatccttagaacaccaggatgcacacagatttcccttttacgatattattcaaactgcttactgtatatgctatccataaattgggaagatatcagatgtcctgcgtaccgtcatcattagtcatgttctcacgcaccaatattcccatcctatcaacagtgttactaattttatggttttggctacataaaacttaaagattccaatggcatcgtgcttcctatggaacatttaaagttattttccccttgttttaacattgaagtttcaaataccatcgtgtttctgagaattttttgttatgcttcctttgcatgattgctgaaggcagcagttgcctttatcagctcaacaaacagatatatatgcagtggccttaagacttcctaacatacgatcttgggtatttgtaagatatttgaagatttttcatgtgtgtgttatttgcttatatggaatacaagtatgatttttcgtccatctcttcttgtttgacgcattgaagcatagtttgatgcaaaagaaaaaaaggtggtgaattggttcattgatgaatttctgtgcccttgatgtttgcaggcaatctcttcagatgaatgtgtacaaggttggaaacatcatctggcagtaatttcctgcatgggcatgcatgttgatgtgcaagaagccaagaactagtacatggttactccatgttcggccagcaataatttccatgtacagcgagcagttttgttctacctctttcacaaattagtaatcagaattgaaatcaatacccccacttggaaatagaggtaccctattatcctaatttctctacattgctgttttgttttcgagggtacaggggatgaagttgtagtcgcagactcacagtgtagtctcggtgaactactactgctcccagaagcagcggtgctcagtggcaatggttgcagtaccaccagatattgttttgtacttggtgtcacacatggaagagcagaataagagaatttcccaaaatgaagcgcatacagaagattttgggccctgtttcagcagaaatgaggaatctggaaggggtcgagaagaagattttcaggttgctgggcgcctgtgcccctgtaatgcttgttctgttctgtacctgaatgttaacgatcaaaaagagtatgttgtgttttggtctgttcttttagaaagctggaatccccagcaaaaacatcatgtaccctgttatgatttcaatgaaggctcggcgtaatgctttgatccaaaaaaaaaaaaagaataagaaaaactcagatatgagagtttataatgttcagacaagttcagacattacagtatttcagtatccttctgacgtagaagtatcccatatgttgctaatgtaatctctgaagtttcgctctttggtccctgatattttatattgtccagacaaatcatgaagagagcaacccatcctcctacagtactgatcagccccttgagtactggtactatgctgtatccaaccaaatcatactttcatgagaatcatgaatatgtgtgtgtatatagaaaagcatatgcacttgcacctaaaatctggaatgttggtgtgctttaagatgtgtgctatctaaatgttcattgctctgtacttgtgaaggtttatactagagaggcaaagaaagtggtacataatgtcactctgcctctgacctcactttctaaacttatacatgctttaagatctgaacaggcttatgaatgatctatagattactcttttaccatgtaactactagtgagatagaaccatgtaaccactaaggctattcccaacccatgacactagacatggttttcataaactccacatcatcaagaaactagtactagacattactctttcaatgcaaacaccactattctatgcttcaatttaatgctacttatctcacatgatgtcttagatgttgtgtagaaattatgtctcatgcaagacatgatttccttctctttcctcatttattcacttgccacatcatttttcatcctaggtgacagcttatttaatgctatggacaccatcctagtcattgggttgagaatggcataatgagacgtctcctattgattcatgtaaaagaagggctatgaacaaccacgattatagttattgaagacatatcttctcattgattacataaaaagtaatgatggtaaaagagtacatagtaatatctctagtaatcgataggtcagttggcaaactgtagaagcactaattagactatattatataataaacaaaaaaaaaagcggtacattgtctctatctattatattattaaaggaatagaaaaaggagcctccacgttcgctctcaaggcctataaattctcacattaatcggagaaaaagaaaaagcagtgtccatatagaaatacaatttagaaatagctgaaattcggaattaaaaaataaggaatattagaaaaggagactagagtccatatagaaatacaatttagaaatagttgaaattcggaattaaaaaataaggaatattagaagaggagactagagtccatatagaaatacaattaggaaagaactaaaattcggaattaaaaataaggaatattagaagtagaacatagagtccatatagaaatacaattaaaaaataatagaaattcggaattaaaaataagaaatattagaagtagagtatagagtcatatagaaatacaattaagaaaaaaatagaaattcagaattaaaaaataaggaatattagaagaggtgactagagtccatatagaaatacaattaggaaataactgaaattcggaattaaaaataaggaatattagaagtagagtatagagttcatataggaatttaaaactaactaaaattcggaataaaaaggagcctccacgttcgctctcatgacctaaaaattctcccattaatcggagaaaaagaaaaaatagagtccatatagaaatacaatttagaaataactaaaattcggaattaaaaaataaggaatattagaagaggagactagaatccatatagaaatacaatttagaaataattgaaattcggaattaaaaaataaaaaatattacaagaggagactagagtccatatagaaatacaattaggaaagaactgaaaatcagaattaaaaataagaaatattagaagtagagtatagagttcatatagaaatacaattaggaaataatagaaattcggaattaaaaataaggaatattaaaagtatagtatagagtccacatagaaatacaattaataaaaaaaagaattttggaattaaaaaatattataagtagagtatagagtccataaaggaatttaaaactaactaaaattcgaaataaacatagtaaaatcaaaagtagagtttagagtccgtataaaaatacaatttacaaacaactaaaattcgaaattaagaaaaacatgggaagaagagtttaaagtcaatataggaatacaatttagaagtaactaaaatttgaaattaaaaagtaaagaatattgaaagatgagtttagaatccacatagaaatacaattagaaataataaacattcagaattaaaaaaaaagaaatattaaaagacgagtatagagtccatataggaatatatataatttacaaataactaaattttgatattaaaaataattaataactaacacgtatataaaatacaatatgaatattacacattagtagtttcgtaaagttattgcaaaatttaaaattatgttatcattgtaatatattttaataatataatgagaaaacatatatgttattatatgagagaaaatataatgatgctagccgcgcaatttgcgcgggccaccatactagttgtatttgtaaagcataagacacgagaatgaaatcccggggacttatactgccaaaaaaaactaaaaaaggaggtttattcttagcttccaaccgccttatatttggctgtattttttctttttcttttcacacgcaaccatttcgtccccctccccatttgatttgaaaccaagagaagcaatgcggggggtggtcaggcaccacggcgtcggcgtggtggcgcggatcaccggcggccgcggtgtcgccgcctgccgccactgccgcggccggaggcgagatcactgacctccaccgtcctcctccagccgagggtaatctgctgattgagttggtgcgggagttgttgggcacagccaggtacgaggaggacttcctccccgccgccgctggactacctcctccccccggtcgcctccgccgctgcggcatctcctccgaggacgccgcgttttggcgagccgaagcgcttgtaccaatgcaggtgcgaactctcgattaattgtttgttgccgccgcgccattgccgcccgccgtgccttctccatctaatttaacgcttcagtttcagttattgcgcaatcggcgacgacctaatgcatacttgcgtcggaagaatttactgctgccatcttccgatgatgctgcccgtaatggcaatggtaacagtattgccatggctcatcaatcccaggggagttgccattgggagactcttgaaatatatttggtctgtgctctttgctttttcctatatttaatgtttctctgaaatgaactgtggagattatgggtaccccatacccacacggcatggttatccgactagttataggggataacttatatatatgaaatatgtaacagattatgacttgggtattacgtttccctgtatattatggaacggcctaaagtcctggtttgataagattgtaaagtagatttaggaaatcgataccgtgttggttaaggtttctatcttgtaatcctgccccccatcctatataaggtgggcaggaggccctctagggggcatgagacaacttgatcgtcagatctatactacacccggcggattcaaatccccaaacaggagtagggtattacctctcattgagagggcctgaacctgtctaaatcctttgtctctgcatccatccacttttaggtctcgtgcgctaccccgttttattattgccgaattcatgtttcgacagttggcgcgccaggtaggggctgcgtcgagttttccgtcgagaagtgcgatggaactttgtgccggcatcatcggtgctactcttgtctttggccgtgatcctctcaacaaaagggcagggtcttcgtcgccaaaaattctatctggatctggtcaatcaaccaggagattaatcaccgatcgaatcgatctacaaccagcttgttaccgtcaattttacctccgtcagtgagatcaaatccgtcgctacaatgctgccatatctgttggtccgtcggtttcgtcaccagggcatgatttgaagcaatcagcaagcagccgccgccaaaatcatgcgaagatcaccgttggttgagcctgtacatcaccaagtcaatactactcggatacgtacggcaagacacaaagtccaggatacaaattaaatatacctggtcaaatctgtggtcaaggaaattaatccatacacaaatcagctattacatgcacaaagtggtctccaaactaatccgtgcatgtgctaccgacgattacatgtctacacggctgcatgacacggctgcatgctacggttcatccattgacaggcctcgaatcaaagttggatcacaaaccaggtttatcgttctaaattttcttatataaattagaattaattcacagatcactaattattatttgatctattattttatacatgtaccgccggccgccttcgtcgctgccgattggtttcatcgcctccacggttggtgtgcgccgctgccgttgctgatggcgatatcgtcttcaccgccggcctgcctccgtcgccgccgactggtgtcctcgcctatacggtcggttggtcacaccaccgttgatgggcatcgtcatctacaccgccggcctacctccgtcgccgccgactggtgtccccgcctatacggtcggttggtcacaccaccgttgatgggcatcgtcatctacaccgccggcctgcctccgtcgccgccgactggtgtccccgcctatacggtcggttggtcacaccaccgttcatgggcgtccacgtcttcaccgaccggctggccttcgccgactggtgtttccgcctgcacggctggcctattatgccgccgctgttgggcgtctacgacttcaccaccggcctgcctccgtcgccgccgactggtgtcctcgcctatacggtcggttggtcacaccactgttcatgggcgtccacgtcttcaccgaccggctggccttcgccgactggtgtttccgcctgcacggctggcctattatgccgccgctgttgggcgtctatgacttcaccgccggcccgcctccgtcgccgccgagtggtgcctccgcctacacggctggcctattatgccgccgctgttggacgtctacgacttcaccgccggcctgcctccgtcgccgccgagtggtgcctccgcctacacggctggcctattatgccgtcgctgttgggcgtctacgacttcaccgccggcctgcctccgtcgccgccgagtggtgcctccgcctacacggctggtctattatgccgccgctgttgggtgtctacgacttcaccgccggcccgcctccgtcgccgccgagtggtgcctccgcctacacggctggcctattatgccgccgctgttgggcgtctacgacttcaccgccggcctgcctccgtcgccgccgagtggtgcctccgcctacacggctggtctattatgccgccgctgttgggcgtctacgacttcaccaccggcctgcctccgtcgccgccgactggtgtcctcgcctatacggttggttggtcataccaccgttcatgggcgtccacgtcttcgctgaccggctggccttcgccgccgccgactggtgtttctgcctacacggctagcctattatgccgccgctgttgggcgtctacgacttcaccgccggcctgcctccgtcgccgccgactggtgtccccgcctatacggtcggttggtcacaccaccgttgatgggcatcgtcatcttcaccgccggcctgcctccgtcgccgccgattggtgcctccacctacacggctggcctattatgccgccgctgttgggcgtctacgacttcaccgccggcctgcctccgtcgccgccgattggtgcctccgcctacacggctggcctattatgccgccgctgttgggcgtttacgacttcaccgccggcctgcctccgtcgccgccgagtggtgcctccgcctacacggctggcctattatgccgccgctgttgggcgtctacgacttcaccgccggcctgcctccgtcgccgccgattggtgcctccgcctacacggctggcctattatgccgccgctgttgggcgtctacgacttcaccgccggcctgcctccgtcgccgccgagtggtgcctccgcctacacggctggcctattatgccgccgctgttgggcgtctacgacttcaccgccggcctgcctccgtcaccgccgattggtgcctccgcctacacggctggcctattatgccgccgctgttgggcgtctacgacttcaccgccggcctgcctccgtcgccgccgagtggtgcctccgcctacacggctggcctattatgccgccgctgttgggcgtctacgacttcaccgccggcctgcctccgtcaccgccgattggtgcctccgcctacacggctggcctattatgccgccgctgttgggcgtctacgacttcaccgccggcgtgcctccgtcgccgccgagtggtgcctccgcctacacggctggcctattatgccgccgctgttgggcgtctacgacttcaccgccggcctgcctccgtcgccgccgagtggtgcctccgcctacacggctggcctattatgccgccgctgttgggcgtctacgacttcaccgccggcctgcctccgtcgccgccgagtggtgcctccgcctacacggctggcctattatgccgccgttgttggacgtctacgtcctcaccgttggctcaccttcgttgccgtcgactggtgtttccgcttacacggctgacctattatgccgccattagtgggcatcttcgctttcaccgtcgaccgccttcgtcgccgccgactggtgtcttcattgttattgatggacgactttgttcccacattggccacttctgccatcaccaaggggaatattataaagctaagtcatcatttattttattctttatatgatatttttccttttcctctgcctcactacaccaattggtcttccattgagtagtgagtcgggggctacagatgttatatcatatttttcataatatttatcttgattgcttgcgacataatctgagtacaaaagtacctatcgagttatggagttctatcttcctatgctttccgtttggtttgccaatggatggttgcctttgggccgattcctagcacccgggggctcgttggatggaccgagtaacgcaaggtgctaagtattattcggaataaatcaaaagcatagagatgagataaatttattttctgctcttaataattgcaaaagtacccgagtagaaaattctgatccgtgaaactttgttccattaatgacgaactcatgtcactcatatgcatgtttgggaagtgcctaggccgactcccggtgcttgatggttatgactagtcggacagagtgtttaaacgtacagagtcatctgctcggggaaatcaaaattgacaagaggagaaatacatatttataaatattttaaaatacttgattttttctcgagtattatatttatatcagatactactcatcctatatgtttgttctgcaggatccagatccagatatgcataaaagggattcatggctttaagcttatctcttacgctccaggaatggatcagtcagaacgtcaccaccggctcgcctcgaccgccgccgactggtgtttccgcctgcacggctggcctattatgctgccgttgttgggcgtctacgtcttcaccgaccggccgcctcgtccgctgccgactggtgtttccgcctgcacggctggcctttatgccgccgttgttgggtgtctacgtcttcaccgaccggccgcctcgaccgccgccgactggtgtttccgcctgcacggctggcctttatgctgccgttgttgggcgtctacgtcttcaccgaccggccgcctcgtccgctgccgactggtgtttccgcctgcacggctggcctttatgctgccgttgttgggcgtctacgtcttcaccgaccggccgcctcgtccgctgccgactggtgtttccgcctgcacggctggcctttatgccgccgttgttgggcgtctacgtcttcaccgaccggccgcctcgaccgccgccgactggtgtttccgcctgcacggctggcctattatgctgccgttattgggcgtctacgtcttcaccgaccggccgccgcatccgccgctgactggtgtcaccgcctgcacggctggcctgttataacgccaactgatgctatcttcttcacggctggctacatcgctgtcactactaataggcatcagtatcttcaacacaagctgcctacgtttgtcatggctgccgactggtttcttcacttccatggctgcatgattctgccagtgttgattggccttaccatcttcatcgctggtcgtctcgtctgctgctgactagtgccctcgcctctacgtctggtttatacagctaccactactgatggacatcatcatcttccgtcgccgactgattatgccgccgccgactggtgcttttatcttcacaactgcgcgtcttcactaccggtttgcttctgttgccgccgacttgtgttcacttcattacggcaatacaactttgtcatcatggtggagcgacttcatctttattatcttcggcaccggcaaactctattgttgctacttcgcaagttttactacttcaccacccacgacgtctttgtgaacctcgacatctcggcatgcaatgccatgttattttactacaacaagtggctctccaatattcaggatttctacttggacatcttcaacacatatcttcaatcaagtgatgactactcgacaacaagaagctataattctcgactctatgttcagttgtttcccaactaatcaaagagtcgggggctacacaaatacatggctcaaaatttgacaagctttatgtcaagatgaagcaatcaattaatcagccaacaagtcaactctgggagtcatcaattttgtcttcgcttcagagcagtaggtcaagattaaatttacatgtctgggagtttggagtcatcaaccaatcaactcatatcagattcaatgagttgaacaacagcatatactttcctccaagtgaagcatctacaacagtttgatggattattgtcactgacatcatcaccagcacatctgcttcatcagctctgacattccgccgttgctaatggatgactaagactttgccaacttgctattccgccttcacggttgacctactatgcaaacgctgatgagcgtcttcgtcattatcatcggctattacaccgctattgactggatcaccgacatcgtcatcttcatcaacatcctgtcaaacctctttatcatagcttactctactgctattgataggcaacttcgtcatcatgtttgatcatctctgttgatgcttatcatcattactgtcggttacgtttgtcgtcgccgactattttcctcatcttcatgattggtggatttcgtcatcgcctttgatctgcctcgtctgtcaccgactgattatttcgctgccatggctacacaactttatcgctgggcgccttcatcttcattgatggctgacctgactgttgccgactggtttcttcgcctccacggctgtgcaacttcatcacttttgattggtatcactatcttcactaccaccaatatttttgccacctctgttgggcaatattatctctatattggtcgtcttgtctctatgccaactgcgtcagctaccatcaatgaacaattgtgactacgtgctcaggggcttactagctcaaatacaagtattatatcttcaatttggacttgctccggatatatgcaacatgaattcatgatcatgggtctattttatatgctcaaagactggactatttattattccccgtaagggttatcaactgaatacttgcgccagtcgggattcaattgttatatctattttggagtatcccataagggataatcactcagatcacatggtctatatcacccgggagcatgttacatgtgtcatcctttaaagggtatcgaaggcatattttttggcctaggcctaatatgtttgcagcccatattttcaggtgtggcctgtcacgttcttttagggacttaggcactttttgcttaggccaaagtgcgcgtgatcaagtgcccaataccttaaaatccttttataccgcagttactcaactttttaggagttggtacaatgcatcttaaaaggtgtcaaacagtaaagctttatatagctgccccgctggcttttttatatagtcatggtgctgtttgggtttttaagcaattgattggatacaatatcattgctttttgccacgtaagtgtgcatttttattgaccaatattatggcttaggctgattatatattgtggtcatttttcaggcggttggtaaatcctttatgagtttatttactcggattttataccacatatgccatatatttccaggtgtggtggaaccatgtgtcttctagggacttaagcacatctgttaaagcagtgtgcgcatggcgtatgcccaatactttggaaatttctttattcacaacatacaagcttctttatagctattttgctatgtgaattttcaatgatgtagccaactttaggttacactcatcatattttacaaagcagtcggtatatcacttggatcatattattcagggattcacaccgcatatgctacatattaatattaagtcgcttggttgactacaattatcgaaaccactcggtgcatctagtcgatgcacctgactttatttttcagccctccacagtcttcagatttggtaaaaatactcgggagaccatggcaaagatgattgaagtactcggttttggagtaatctagttcgagagaagattatcttttcgactgtgaaggtctcaggggctactgtggagattatgggtaccccatacccacacggcatggttatccgactagttataggggataacttatatatatgaaatatgtaacagattatgacttgggtattacgtttccctgtatattatggaacggcctaaagtcctggttagataagattgtaaagtagatttaggaaaccgataccgtgttggttaaggtttctatcttgtaatcctgcccccatcctatataaggtgggcaggaggccctctagggggcatgagacaacttgatcgtcagatctatactacacccggcggattcaaatccccaaacaggagtagggtattacctctcattgagagggcctgaacctgtctaaatcctttgtctctgcatccatccacttttaggtctcgtgcgctaccccgttttattattgccgaattcatgtttcgacatgaacttctctgttagagaatcttgaagtattgcatgatactcggacagttctgaaggagcttctctgtcaatttcacaaactacaatttttatctctgttctgcaggagaaatacaaagatttgcatccgaggttgcctgtcattgttgcggaaacacttctttacacagaccctgagattgagctaccactttggctagtccagatgtttaaggtgatctcctgatgtatatattccaatagttacaccaactattatctgattgaccactgaccttccatttgtaccttccatttgtatctgattgaccatttgaactattagttacaccaaggctggtagcaggatgatttcatggggtatgtctggcacagaggcagaccctgctacattatttagattgtacataaattatggacggcacacagaagcggccaatttgctggtcgagtacttggaatcattcgcatcatcggtaatagatcaacaaactcaaaaatccaattgcaagatgtttgcaagcacatgctgacagttacaccctttgaaaccatcctgcagagacctgtggacgttctccaccgcaaaaatatgtcagcgacctggttcccatacactgccatcgagaggctgtggtgtcagctagaagagatgcaaaatgctggccacagtgtggatcagtgcgacaggctcaagaagttgctacatggatctctgatgagtcaccttcagcaagttagtactacatttaatggcttcccctttcaattctgtatttgttttctagatgtcacatgttgacgacactctctgtttgtgggcttctaggttgtggttgattcagatgatgtgctttcatcgcttggaggagggaaaggaatggggagccaaagcaattgagatttttttttctcttgttcttgaggagtgagcaactgatatctcgtgagccgtggattagtgtcaggttactgttgtactgtaatgtgtatgcaaaaggtgtatggctaatgcctgtgagccatgttcatcacctgtttctgtagacaagggcaattttccaattgtaaatccttttaacacttatgtgaagaaaaatgcctcgctcctttgaagagtaccaatctaccagcagtcaccagacacatagataaagtttactcgtgcccgtttgggttgtttgatggcagcgtatcgccgttctcggaactcggcgtctggagttatgaggtattattttgtacggtaaattatttaatataggatgttttctaaaaatttccgtcacagcgttcttctccctcgcccaattcagacagccaaaggcgccgttattcatgatccatacaaaatagccaaaggcggtcggaagtcgtcttctcctatcaccctgggaatgactcaataacactcaaaaggttcctaaaaaaacactcaaaagaaaggtcctttttgcaaatctccgcccatttggaacttaatgtacggaaaaagatttaagtctttatgaaaaatgctatgcatctttcacccttgtccaatctagaccgcctatttatgatcggatggtcatagaagatccaaagggatcggcgtttttttctccgatcccctggagtggagtcaatgctccgaatagagcgagggagttggagttttcttctccaaacccctgggagtcaagaggggctttttcacaaaacctccggcctattgggccttatcgccttatcgggtatgtgccgctcaaacgggtacgggcaaaaggcgtgggcccgagacacgcggagccctccctccgcaatgcaacggcatcttcttcttctctctcccctctccccgagacaaccaatcgccaccgcacacacctctccctctccctcctcccccgcgcgccccgcggcctccgccacccgcgccctcgccgtcgccgccccgtcccgtgcctcctgctccctccgccgccgcgcgcgcggcgcgtcgcaggtgtgatctccccgcccctccgatccctcctcctcctccgtctactccagatcgatcggtctcttcttcgtcctgcgggaggcggcggctttctcgcggtcgatttctgatccgcacgcgggttctgatttagcggggtggtgtgcatttctttcgatcggcggtgccgtgcattttgtttgggatttgggaattgtgtggcgattattgcgtgtgatttcgtatgaattactgtgttattcctactgtttcgcccaagacaaaaataatagggttaattggatccatgccattataaattttatgattttgaaatatgccactactatttacctatttaaagtcataccattacaatttagtagatatttgagaaataccactgcatacctcttagatgcatagaaatttatttttggaccaaattgcccgtgctttcttcctccatccctttctctctcaactccttttcctcccattctctgcctgatttgatcatctgagttcccattacaagcatggtggagagacctagcgggcaacgtcgaagaagtcaagtgcagctgctagcacggtgccatcatgccgccgcccgccgccgtgtcacgtgagccacccaacaccgcccatatcaattttgagaaaacacgaagaaaaagagaacaaaaatgcacggatgaaagaacatgtctctacatttgcctactagtactatgtacaatcagtaaacgagcttcgagaacacatcagcggccggcaccggcgttgacgccaccgccgtatctcaaatatgtccaaggccgacagccgctgctggattcatgccgaccgggtcagctccgatccagagagagatgggaggaaagggagtagagagagaaggggatggaggaagaagatagggttaatttggtcaaaaacaaatttcagtgcatcatagggggtaagtaatggcacatctcaaatatgtattaaattgtaatgacatgactccaaatacacaaatagtagtggtatatttcaaaaccgtaaaaattataatgacatgaatccaattaacccaaaataataataatgttgagaatcatgtgctcctcgacacgcgtcgtcccgtgttcttgaaatcacagacaacatgggtcgggtctacctaacatcatagtattcctattcgtgggccacgtgtttttttttaccaaatcactgtgcttgtttcactatatgttctgtaaaaaatcgatgattggtaaatactccctccatcccaaaatgtttgacgccgttgacttttttaaaaatgtttgaccgttcgtcttattcaaaaaaattaagtaattattaattcttttcctatcatttgatttattgttaaatatactttcatgtatacatatagttttacacatttcataaaagtttttgaataagacgaacggtcaaacatgtttaaaaaagtcaacggcgtcaaacatttagggaaggagggagtaatagttggtatcaaagctgaccggaaatttgtggtgtggccacaaaatctgtaattccgtccaccgtggcattttcattggcccttttgctttctgactgaaatggttcaaactcctttgaggcactgatgcaacatctgaactgaacacagtgtatagtttttaagtgattttagtgctttacccaagattttaacacctttcccaatttggcaaccatctttgcaggctggtaaaatggataagctcaatggttctgcgcgtctcatgattgtttcagatcttgaccatacaatggtgtgtttctttcaactcataccttggatttgtccagcgctaatcatgacattttgtatatctcattaatgctcaatctttttgaacttttgcaggttgatcatcatgacgaggagaacctgtcattgcttagatttggtgccctgtgggagtctgtttactgccaggattctttacttgtattttcgactggaagatcacctaccctgtatatggaattgaggaaagagaaacctatgctaactccagacatcactatcatgtctgtgggcactgagataacatatggtgaggaaatggttcctgatgatggctgggtggaatatctgaataataagtgggacaggaatattgttgttgaggagacagcaaatgtttccgagctgaaacttcaggtatgttcaataacttgcatggttgctttcttttaatttataaccattttgataatttgatgactaattaataagcaacaacactttattgctgtacatttacatggatataggtagagtcggaacagcgtccacataaggtcagcttctatgttgacaaaaagagtgctcaggaagtgataaagtctctctctgagaagttggagaaacgtggggtgaggaagcatttgtcttgatgtggctcagctttgaataattttttctctaagaaacattcatattttgttttcagtgttggaccgtttcttaagaaacatccatccatgttttgatttcatgtatgattaactggtattgttttgttctcagctagatgttaaaataatctatagcggtggccaggaccttgatgtattacctcaaggtgctggaaagggtcaggcacttgcatatttgctcaagaagttaagctcatgtggaaaaccacccaataatactcttgcttgcggtgactctggcaacgatgcagaattattcagcatccctggtgtacatggtgtcatggtcagtatgcaataaattttgcatgaagtagcgaacaaagttcataacagattgaatgtgtgcttactgcaattacaaagttttttcaaatgtttaggtcagcaatgcccaagaggaactacttcagtggtattcagaaaatgcgaaggataatcctaagataattcatgcaactgagaggtgtgctgctggaatcatacaagccattggacacttcaaactaggacctaatgtttctccccgagacgtggatttcccttatgtcaaggagaacccggtaaagcctacggatgctgttgtaaagttttatgttctctacgagaagtggcgtagggctgaggttccaaagtctgattcggttacacagtatttcaaaaatataactgtaagtatgcagcttctcactctgattttgttctgtaaaaaataacttggtttacttttgtcaaaaatttcctgtcttacctgtttatatggcataatgctttagcttataaggctaaggagcaatatacctcctttggcatgcacatctatttcaaagtttctgagagcattctaatcttgagaaaatgttgtagtttcatctcaaaatgatcatggtaatgacttgttattatagtgactttacaaactaatatattttatttattgtgtgttagcatgcaaatggagttattattcatcctgctgggcttgagtgttctcttcatgcatcaattgatgcattggggtcatgttacggtgacaaacaagggaagaaatacagagcatgggtggacagactggttgtctcacaatgtggttcagagggttggctggtgagatttaacttgtgggagttggaaggtgagtccttagaattctgccaaataactgaattagcctgttatgctgttgtatgcacctttttcaaaataaattagtgttcattttcccagttttaacttgttctattactgtccccttaatagttttctattagatcatggccctcctggtctacagagttctaatttcaacagaaaaatgtgctgcatgatactggatatggtcccactgtactcatttcaatataaactattgaactctcctatcttttcgcttatccacttggtccagacatcccagtcgtctactatttcctgccactaatcctgatgaattgaagaggaatggagcgaatagccaagtgataaccaagaaccacattgatgatgttagaagtatataggcagtcgaattcgtagcaatatcaccatacaactgataagcagtaacatcagctttagtcctttcacaaaatggcttctggagtacattctgtaagtgttagcaaactttacatggcgaacaacaaaatctctgccagttgctctatattttgcaccaccatggagaattgtatggccaaaataatgtgacttggtcccaagatagaaagtgaagaacactgaacagagctgaagctgcatgattatgaaatccccaagggcgcttctgaaacctctttctagtccaatctccataatcattggcaaggccatcaaaagacctagctgcacaatagactgagatcccatagccacttaaagtgcatgattccctctcatccatgcttgcttcataattgcaaactcaagtccacttaatgctaagtcaagtcttccatacaagaaaacatacactatcatgacaaccatccatacaacattaagacaagaacatgagaaaatatgcatgacggctagctgtacattaacaaacaaggttcagatgttcattcaatgaagcgacacatgagttacattaacttgccttgttctctgcactagtgtttaatagagaacacagggcagttgaacagtggacatgtgattatttgcagttatggaagtttctgaaaatcctatttctctaattaatattcagtgcataaaggaaaggccagtctcatttggctgcataagttatcagcatacaaatgcaatatgtaagcagtaaattcggcatcacagaactagtgttaccagtaaatccaatacatggtttgcaacatatgtactgatgtgagaaagaaatgaatgcggaattaggctgcatatctggtcctttagtaaacaatcaactacttgtgctatcagcttatcagcacagcagtatctttccacataaaatttcaatgatttcacctgatatgtggtattggggttcaccgttctccaagcatttcaatgggatgagttcacattttctgcattataaattaatccgaacttaggcaacagcaaagttttgagcatcacaccaaagcatatccgatggtcaggaactcaggacaaccttggattaaaaaaaaacatagtcttttcttttagttgtgcgggccgcaataccttaactttttttttcttttgacatgttcccattatgttatataattagtttttggcatatatgatcctcaactaattgtataaataatgctgtaatgccaggtgatgtgtggtcgtgttgtctgacaagtcttgcactgaatgcgaaggtaagcatcatctatgttcagtccgaaacctatctatgcctcctatacatatgcatacatatcattaattcatttgacatttgtaccatgtaacgtgtttacataaactgaaaaggtgggctaactttgctttctgtttttggtttcatgatctcagcctgaaacccccgagggcttcgtggtaacacacatccacaaaacatggctcaaagggtactcatcagcggatgagcaatcgtccaagctttagaaccttttctgcacctccgtgtgcacatggaaggaatttactcgaggataaataatgaatcttctcttgagattacttccttttcttgtctatattgtcaattttgttcaaaatactatgctggaggattcccagagccccaaattaagtttgacacatccttgtttgatgtgtaagataaatcataaatgttactgtatatctcatgattatcatgagcgcataaagcaaaactacttcacttgaatatatgttactagtgttcttccattcatgatctacagttctgaccagttgctaatgtggagttaacatgcatttatcgagtctagactctagaggctatacaagatgggataggtatgcacaaatcttaagcgaaatcgtgctataatggtccgtttggttggagggagttttcaggagggattgggagtttagagggatgaggctattaagtgttttgtttggttaggagacatgagaattttggtgagataggatggggaattgaggaactcccttattttcaatacctgggtaggggtaggtaattgggagggaattcctcctttcctttgtctaagcaaatctcagccatcgtttttattaatgacctaatctccaactaaactctctatcaatttccatcacctctaccaaacaagatattgggattaaaaatcaaattctcatcttaatcccatcatcaattcccttgtaaataaaattgccccgtcgttccgcaattcttgtcactagtaactagacagtgtaacttaaattttgattatattttaacaatttaacaaatttcaaaatatatgtagaagtaaactatgcgactttcattcacaatcatttaacaattagaaatttctatatttcatcgaaaatagaaaccaaagtgatttatctatatgttataccaacataatcttacattaagatccatatttcgttcaataaattagatccataactctgtcgatcaagatctccactaaggatgaactataataagcattcccaaaatgtaacaaattaggtatgcattctatcttaaattcataatactagaatattatactaataaaatatgttcaatcaaatcttatgctattatattttaggatgaaggaagtagtggttagcagtaagagatattgtgaaactaacggaggatgatactattcagcactgtggtcgttaatcgtgtttgaaatttcggttcgaaatttctgaattttcggcccccaccggcaagcacaaatctccccgaaattttcagttctttgtcaaatatttgtaaatttggtcaaaatttgtttaaattcagtcaaaatctctactattacaaaaattgaaaatgtttttgccagtactttggtacgtcatccgtgtataagttggttttttaagttcgttcgcctttggaaatacaaatccgtatttaagtcgggttttaagttcatttgcttttggaaacacagaaggagttgtataagaaatccatttaagaaaactcacatgctaacttgagatgatcgaactcctaattgtagctcatgattttctagaaaaatatatatccaaattccaagctaattctcatagtaaatttcatcttaactaaactgtataacaataataaaattaaaatagcttttactcgttgcaacacacaaccattttttctaaatattcaaaaaaatcagcaaaaaaaaccaaaatttcggtgattccccttttttcggtctccaccggaaaaaaccaggtttcgaaattgcaaaccatagtcatcaacaatcgaagcactgaaaaagtaatatatctatatctactattataaaagtttaagatatttttgccggagttttttcgtacgtcgtgaaaatttgcgttcgatttctattaggcttgggcttgacttgtccgtgtcacgcagaatccagaggcgcgatggagatcgaaggcagattttgcgtcatgtcttgactcccgatatctcacgtctcagcgtcaccatcttttttttttcgtccgctccgtgttgtctccgcctcgtgtgtcgcatggcccaccggaccgtgcctttccagatcattactgatcatgtttgcagtttgcatcgtcttgcatgcgatggagaaaagcatggcgtcactgatcatgccgcattgctgctgaccgccaagaattgatttgtcagatgagagtttcatgtatgcgtgcatgcagcgtgcactaaagttatagccattagtatggaactatagtttatgcaaatgagttacacatcccaaattaaattaaagaagaaatatttcggtcattactcccaaatctatattttccacttccccggagctaaatttcatgtatcaaatttgcattcagtatccatctatctatacttaattaaaaaaaaatcgtaagacttccgatggaattttcgtctgctactcgactctcatcatctcgtgtcatcacacattgtgccatcaattgttacactacatccgattgaaatctctactattataaaaattgaagatatttttgctggtattttaatacgtcatttgtatttgagtcggtttttaagttcctccgcttttgaaaatacagatccgtgtacgagttggattttaagttcgtttgcttttgaaaatacaaaagaagtcatataagaaatttcttaaaaaaaacttgcatgctaacttgatatggaagtcagattcctaattgcagctcatgattttataaaaaaaaaatccaagcgaattcacatcgtaaattttatcctagctaaaaccgtataacaataataagattaaaataatattcacccgttgcaacgcacgggcatttttctagtactattataaaaattgaatatgcttttgccggtacttttggtacgttatccgtgtttgaatcggtttttaagttcaatcgctcttaaaaatacagaactgtgtttgagtcggtttttaattctgtttgtttttagaaatacaaaaggagtcatataagaaatctctttgaaaaacttgcatgctaacttgagacgatcaaacccctaattgcagctcatgattttgtaaaaagaatatccaagcgaatttccacagtgaatttcaccctagctcatgattaaagtagccttcacccgttgcaactcagggttatttttctattatatatatatatttaaaaaaaaatccgcacacaaaatctccgcgtacacatctcacaaaaaaaaaaagcgcgtaacagggaggtgggccagcctagaggaagtggggaagccgacgaccccacgtctcgccaacacaaaaccagaataatcgccaaatgcgcgcacctcccgcgaaccccgttgtcctcctcctcgccaccttcgcctccaccgattccatttccacccccacgtctcgatcgccggcggacggcggaggcatttccgcccgccgccgccgctccctctctccgtgcggcagcttgaagcgcgcttgcgcttgctttgatttctgatttctgatttgtgagggggacgaggaggaggagatgggcagcgtggggctgaacgacacggtgtcaggggtggtgtcgaggaaggtgctcccggcgtgcggtggcctctgctacttctgcccgggcctgcgcgcccgatccaggcagcccgtcaagcgctacaagaagatcatcgccgacatcttccccgccactcaggtcctctcttgctctctgccaaccgcttccccccgcccctgtagatcgtcatgtcctggaagaaatgcttcgattttaaaacgcgaatattagggaaggacctaatagcaaataattagaagaggtgaggcttcgaactcaggtcgcttagcccaccatatcgtggagctagcctttctcgaaatgcttcgatttttgtaatcccttgggaagattggagcgcggattgcgatcccattatattttgctatatgctcgattattgtcttttgttttttggtttgctcaattcacaaggttgcccttccccttaataggttatagtctccagtttttcgagaaatatatttttagataatgaaagcttgtattgaacccggtcaattacatcaaggtgatacgattcacgaaatatatagtgccatggcctacattgctcatctacatgttctagtagctaatgcctagtggcctacattgacacattgttctactagtttttagttgcatggcctacattgctcatctgcaccgcatgacttcttgttctgcaggacgaggaaccgaatgagaggaggatcgggaagctgtgtgagtatgttgctagaaaccatcatcgcgtgccaaaggtgcggccatcgactccgactcagactttatctattcatccaatttctactgcgctttttattacagaaactctgcatagagaaaggctgttgtgttagaaaaagaagtagtactataagaacagatcatctaaaacatgttgtaaactactacagtgggttcttttatatcggatactcctcttttattttgttgtttttaaatggatatgacttgggaggaactatgtacatggtataacaggttactagttatacttagttttttcttcagacacaacagttattttcattgtgctctaagctaggggaactcttgttcattactgtctgatttgcatgataatcgtcctgtacactcagaatgatttgtagttgccatttgacttccattctcttgcatattgcatctttgcagattacagcttacttagagcaaaggtgctacaaggagttgagaaatgagcagtatggctttgtgaaagtagttgtgctaatataccgcaaactacttgtctcctgtaaaaagcagatgtgagcctttgtttttcacattcagattacattgctgtgaccagtaccaaatatatctcattatatacctgtaaattacgttcaaacagatgtggatttcaaacagaagatactttccattacctgtaaattattttcgaatagctacaaaaatctaaaaactgatttcctcagtgcaggccattactggcaagtagcgcattgagcatcatatgcactcttttggatcaaacaagacgggatgacatgcggattataggttgtgaaaccttgtttgattttaccgtctctcaggtattgcatttgtatagtctgtagcggatgcctttctttgctcaaagatctgtttcaaacagcatcttctgatctctgatttgattcgaggtggacggcacatatcaattcaatttggaagaacttgttccaaaactctgtgaattagctcagatagtaaaggcagaggagaaggataacatgctccgtgcatcaaccttgcaagccctttcagctatggtatgtctccctgcaacctgcatgatattgtttaatgtgatgttatctttgctaaagctaaatattctgctagagttaaggacccttcttagaagtatataatgccttgttgcatcaaaactatacttttacattgtattccactgaaatcatgaggttgtcactaacattgttgacattcagacttgccttctcttgtaatttatagagttgttaatctaataattgcaaacagagttgttaatctaagcatagcaaacttctttcaccaaatatgattcttctaatattgacagttttcattttcttgtattgaacagatttggtttatgggcgagttttctcacatatcctccgcgtttgataatgtaagtggatggcaaaaattgttgaattagtgctgtataaatatgcaaagccttctcaaattgttatgaaaatagatgcacaacggagacacgaattttatgtggaaaacccttgcgggaaaaaaacataggcgccagctagcaatgatcactatagaggaattggatacagacgcaggggatacatttggctgtcgcaccctccccgtgtgacttacaagggatatatataggagaaatctaggagtcctaataggcaaagactcgaagtcctaataggaaactaatcctataatgcggagtcctattagaaaactaatccgaatatattgtgggcccaaaattcggatcacatatttaacacaaatgttgtgacacatatctctctatggaagcttgctcagagtactatttggtgccatacacgtttgtctagagggaaaatgtgggtttcttttggaagcatcttgatatctcaaacttatattatttattttcactatatctgctaggttattcaagtagtgctggaaagctataaccttcaaaagatgcaaaatgacaatatagacagtgaagctccaggcaatcggtgggtggaacaagttcttaaagcagagggcaacgccaccatctctaggataccttcttggaagagcatagttgatgacaagggagagcttcatctacctgcgtaatatgactttctttggtcttttcttacttcatcttgtttcatggccacatgtttagccgactcctgtgctgcagggaagatgccaaggatcctaacttttggtcacgagtctgtgtgcacaacatggccaagctgtccagggaggcaacaacattccgtcgtgttttggagtccctatttcgtcactttgataataataattcatggtcttcccagaacacacttgccttttgtgttcttttggacatgcaaatattaatggaaaaccaaggttctctatttgcatccctttttaggcaactggatttagatatttgatgcgcacatgaaagtgtttactcatttttctttggtttctgcagggcaaaacattgacttgatgatatcaatactggttaagcaccttgaacacaagtctgtactgaagcagccagagatgcaactcagtgtcgtggaggttatagcttcccttgcagaacaatcaagagctgaagcatcagccgcaaccataggtgctataagtgatcttattagacatatgaagaagacattgcatgtcgctcttggcagcagagatttggaggtcataaagtggaacgacaaactccggaatgctgttgatgaatgcatactccaactgtcaaagaaggtcctttactcttgaactgaaacttcttttgtgaattgtgacattctgcttgctgtactttgtcttcatcccttacagaattccaatcagatgcttcctagtgtggtaataggctgtataaatttcattgttattggattataatggtaggaacatacgccttactatgttggtattattacacaggttggtgatgctggacctgttcttgacatgatgtctgtgatgctagagaacatctcccgcactccccttgttgctatagcaaccacatctgccgtttatcgtacagcccagataattacttctatcccgaatttgtcatataggaataaggtatgttgtggaaacacaaatattaaatttgaatttatattatccagcaacacttgtatttgtttggaagctcactctccatcatatttttcaggtatttccagaagcactctttcatcagttactcttagcaatggttcaccctgatcatgaaactcgtgtttctgcacaccgcatattttctgttgtccttgtcccgtcttctgtttctcccttctctaaatcaacatctccaaatcagcttgtgaagcatgatattaagaggactctctcaagagctgtctccgtcttctcgtcttcagctgctttgtttgataaattaaaaagggacaaagagtccttcagagaaaaaccacaggatggaagcatgaacagactttcgcatgctgctgacaatgatacttctacagtcaaggacatgccaagctcgcgaagtcgaaggcacagcttcaaagttcctaatttttctatgaaaagggttgcttcattgtctctgaaatctcccatgtccccaaaggaatgccaaaatacctcggccgaatcatgtagtgaaacggtattctcgtgtggaacctgatctcaatctcgttttcaatatttaacaagctagtaacatttgagcaaaaggaacatctatttaactatcttctgtgcactttcaggaatcaactttgttgagactaagcagtcgtcaggccacacttttgctgtcatctatttgggctcaagcaatttctcctaaaaatactcctcaaaattatgaagctattgctcatacttacagtttgcttctgttgttctcgggatcaaaggtacttcttgttatgttgtattatccaccttacatatattcttaaatgtttccagtcaacaaaactgtaaatttgattatatgatcatatatgagaaatttatcatgctgcatgtaacatccttcattcctgtccatattgctgttattctctatccaagactcatttgtaatatttgtaatggtctttccacatctaatacttagcttcattaccctgttttatcatatttttttatgttttatctttttgctcttccaggcatcaatctttgaggctcttgctccaagttttcaggtggcgttttccttaatgagttattcactagaaggaacaggtaaggtggttaatcatactgtctagcttcagtactgatactatataagttcttaactacccacataggatgaaactctagtggatgatatcttagctattactaaagtacgactgagttagttccttgataattacctaaccattttaatcttgctttttagattcattgctgccatctcgccgtcgatccttgtttactctggctacatctatgattatgttcttttcaagggctttcaatgtggcacctcttatcccgatctgtaaatcaatgctcaatgaaagaacagtaagtctgataaaaatgtctcatctcttcagctcttctttttgtataatttgcctggtataacagaatacaattgttttttcaacaattgacaattttgaggaggcatttggtaatacctacatggattgtaccattgaggcatcaaccatacttaaatctttccatgttgattttctaacggtgtttgttgctttgatatatgccctctttatttaccatacaaacttaatagctaaactttatgtattgcttttgttggcagatggatccattccttcatttagtacaagacaccaaacttcaggctgtgaaggactgctcagaagaaacctatggatcaccagaggatgataataatgcactgaagtctctttcagcagtagaactaactcagagtcaatccagagaatccatggcctctacaatcatgaacaacataagagatttaccagatgtaacattccatattttcttccaaaggatctcttatattgtttgaatcttgcttcagaatagaaaatctgtttgaagcaaaccctatgcaaattttactgacaattatttccaacctctgcagtcagaattacaaactataagaagtcaactgctaagtgacttctcccctgatgacatgtgtccaacaagtgctctcttttttgaattaactgtcagaaatccaggttgtgatgaggattctagcaatcaagaggtaatatgaatcctacgtattatatctttcttttgttcttcttctttttccatcctgaccactaggaaatgagcaggatgtgctgatcaatatggcaaatgacaatgacacctttggggaagtctacgaaaatacagaagctactacagcatctgtgcccacagcaaatcttctgggtatcgatgagcttctagaatcagtacgttcttcttgtttccatctatcactcccctccttttttgctcttatgtactagtatatatttaactgattgaactttagcgtgattttagccaaaaatcgcatagtcagaccatgaagaagtactgaatttttagcttctctctttcatgtggctgaagtaaagaaccaaaacctaaggcaaaaactgtctgacactgacatgatcaacttatacctgtacatgctttctacaggttgtcactgatgcaccatctcagactgcaagatgctcggtgtcaacggcccccaacatcccattcaaggagatgactaaccaatgcgaggttctttcgatggagaaacagcaaaagatgtccgtgctcctgagcttcaaacacaaaaaccaatcaaatgtcctgccgatcaatcaagctgacaacacgggagcagtccatatttcctctgacgaccaggtgcctaagttcagaacaatttgcttgatactatcatcttttcctctttgcccattttaccaatgcatatcagtctggaatcgggagaaatgaaacaaaaactacaagtatcatggaatgggacgcatagattagttttactaattcttaaaccatcttgtattgctgcagaatacgaacccttttctccagcaaagccttgatggctaccccaaatatgttgctgatggtgaggcactacaggtagcagctgatgatgtgttccagcagcaattcttgaagctgccagcatcaagcccttacgacaccttcctcaaggccgctggctgttgacactccaggggccatgctgctaagacaagacatgtactgattaattgtggacactaaaaagtctgcaattgtattgtaaccagtgtatgagtgcagcctcttcttaattgcaagatgtaaatctcctcctattgtcaatttgtcatgttccgatccaacggctgggaaggaacatcgcattctccctgcttttgtttgtgcaacggtagaggaatagtttgagaagttcaaactatggtacgaaacacataatttaatccatacaaatcgataaccttattttcttcttggtttgatcgtgccgtgtcatgtctacatgtcggccaaattttgtttggctcaatcttataaagatgttaataaagatagatgtacatatttacgttcacaggaataagtgtgtgtaagcgtctacctttgtaccgtggaaaataaagtttcgtggattgctacacatgcttttcttttaaaaaagtttgcaaaacttttatgaacaaaactcttatctatttgatttaattaaacgagagttcaaaatatctagatttacttataatttgcgaaatcattgttttataaaaattctctaagaaacttcacgtataatactacagccttttccttcggattaaacaagaaacggcgagacgacgaccaagtacaatagccaccttaccagatcgtgtttagagaaagagaagaaaaataatcattaattaatccggattaagaaacaggagagtgggtgaccacctaatgctcctctccttgtgccgtccgtacatcgtgtgacgatttcgtacctggcgtcgtcttctatccaaggagaaaaacaacagagcacagaattaatattaatattaatattaatattcctttcgtaccatttcgtcctcttccggccactctgtcatcaacgtcgtcgccaactcacaacacggatagatttcatgttgtttatattatctcacaaattctctcttggactactaatactatatatttgatcttcttccgtgtggggtcccttcttgctctatgctaattaatggtaaattaactctggcacgattttttttattgcagttttcgtcggattacacaagtgaatgggaagtgataaatccgttcatacatgcactaggaactagttagtcttaatccatgtgctaattgtgaaagttcaggttgagtttggttgtcttgtttttagcctagttaattgcttacatcacaggctcacagcacataaccttgcacatcatatctaaggttagtttcacctgtgtacttgcatagaactataaaggccggtgctaatcttgggcctttaaaaaaaaatcttagcaggtgaattttaaacagagcaattatttatggactctttaaggcaagcatggtccatgctttttcagaaaaagcgggttactcaaccagcaaatctgctggaacaacacctagcttagctagtactacagctaatttgacattcattcattcctcaacaaaataaaaaactaaataaacaaacagacccaaatcattacagtccacatagctccaaatctccagcttaaattagcgaagatcacctaattaattaaacccaagcacacacaccaccccttcctcatcggccactgacaagtgggccccaccagccatctcgacggagccgggcccacatgtcagtgggacaccccctaatatgaaggaatggtcaaaaaaatgcagacgtgtatccaaataaaaacagccactatgctacaaaggctacagctttgcaattctgaacaaaccaaaccaaaccaaaacaaaacaaaatctgccgccctcgaattctcgatcgccgtactagtataagaatccccccatcctcgatcgatcgatccatcaccacgaagattacggaagatcattcttttcttgcgagaaaaatctgttcttgggagagaagatttgatctttgatgatgatggggtacttccgggcgccgaggaggaaggcggcggcggcggcggagggggagagcgtgcgggcggcgctgctcgtcggcggcggcggcgaggaggcggcggtgccgaaggggtacttcgcggtgtacgtgggcgcggaggcgaggcggttcgtggtgccgacgagctacctccggcagccggcgttccggggcctcatggagctcgccgccgacgagttcggcttcgcccaggagggcggcctccgcctcccctgccgcgaggaggacttccaggccaccgtcgccgcgctcgacgcgcgccgccgcccggcgagcggcggcgcgatcatgagcaccatggtcaaggccaggtcgttgtagccactagcccgccataggagagaaaatttccagaggaagaattctttggttgattcgatgtggctcgatgtacacaacacaagcatggtgatctgatctgatctgatcgatcgaaatcgccattgttcatgtactttgatgatgcgtgtgatggagcggtagatagagtggtagaaactagaaacgatgaaaaattactgttgattctgcaaaagactctgaaactgacatgaaaggtggaaaaaaaaaagagttgcatcctgatcttatatatatcctctctctggttaatcagaagctttaatttgatcataaacctctcattcttgattatgaatgaactggaggattgatgttctgcttcatcaatgaaggttttgtgctgagcttgcctgcaggcttgcagcatatctcagttcgatgcatatgagcaattattttatttgagttaataattattatgtgtggatcatctgaaatgatgatcctagaatgaagtatgcatgtgactggatgatcacacttcaaggcaagtagtaattgttttcatttaaaaatctcccctctttttttctccggttactgatagaagaacagcatctccacaaatggcacttccagaatgctaatgttcaggttaggttctgcaagatatagaagctgtctagctctttccagatggcacctcaatctgttctgaatgatgtccacgtttgttcagaaaatagaatgcaggaggcctaccatttccttcttttttctgtttgcaacaagatttgtacttgcagctggcacaactgaaacaggtggcgcaatataccataccagtggttaacttcaatactttcttttgcgtgggtgattaactttaacaatgtgatcattcttcaaatacaatgtcattctcaaagattgcatctgacaagagggcattacaaggtaggagtagatctttgcatgagactagcatgatttttgtggcttctggttccaggcatttcaatgttgcatctgtcagagcacatgtgcaaaaagattttatgctatgtattattgttcctaatctagtgcccctgccatgtgtaactgtacggcatctttcttctctggaactctcatttaactctgaataataatatagtctaggactaaaggacatgtcatggcattccttaatggagaggaatgaggattagtcgaaggtactagtagacatagtacatgtgtgaagcatccaacaagagagacaatactaagttacattaaaactccagagaatatagagattagtgagttcagaaagagcatgtgtcaagaagaaacaatttagcaagagaggcactaaaattcagagggttgacttccccatgattcttgcagatctattgaatgattgtgttgttaatcaggaattcaggattgaaccagtgagagcttcctacatctgaacacatacttgaggattcagagatgagttgtcatcttgtcattgaaagctaattttaaacaaaaagcatcaaggtgcaatgacatatatattgagagagagaaaaaaaatacaactattaatattacttccttgagacacaagttcaaatagcacaaatgaacactgttcaacttcagaacatacaaaatgaaagtgaataacatcgaacaagcgggtaaagaattatcaacaaagaataagtttacctaagatactttttttagataatgtgaatccttgattttttttcctctaaaaagaatgtgaattcataacctcatcctcttgaacaaagtagcaaagctcagcaactccaaactcttcctcctcttctcttcagaagaccaagaaccaagaaaacaacagcaacaaagtgcaataacaattgagtgcaaaggggagaaactaagaaataccatcatctgcacaagatctcatgctctgaagaagagtagcacattgctgccttctcatccttcctgccaaccagcctcaagataccctcaaacacctcaacatcacatggaatcctcagagctccctcatgctggaacccaaactcctcctctgccttcctgagtagctgctcaaatgcccagtggccaagatactctgtggggatgacaaacctcctcatctcctccccgacgcacaccgcgaagaaccctttcgggaccgatgcaccgccgccattgttgttcttgccggcctttggtgcaagtgcagccctcttccacctcttgagaagctggtgcagcctcacaatgtccctgatcttgttgctgcttgccctgcctccttgctctcccattgttagtgcttttgtgtttatcagattgcttggtgcagagaacaatgtggggggagactgacaatatataggtgtttagattagtgtttagttgcagctaagtttgttccttgagttagtttgaatgtactaatcaatggtttgatatgatcccttttcttaatgtttgaggcctctgttcttaatgttgatgttcttagcataataaactaaagcaattaagggaaacggacaccactagtttctgagggttctttcattgtaacacataacctatattgcatttttccccacgaacgcacaaaaggattacacgttatttcattagaagaaagcagtatgcataacctatagtgcacattgaaattggaatcatttctttctttctgcagttaaatcagcttgaatttacttccttcaacttcattagattgacaaaattatattccaaaaactagattgacataataaactatatctggttcaaggaaaagaaagaataatgctaaagtgtgaaattggtgaaagattcctgacgtttcgtacacggccgttggatttcttttctgaataagttgttctttcaatatcatgtgaaaaagctgactgcctcctggagaatgcaaagtgtgatccaactgatgaaagattccatcaccctgcctaatgatgagcaaagggccaagagatgcaatcaacacctactctagtcagtttatcagagcaactaccatgcatgatttgcctcaatctcatcattgctgagagccaaattagacagttcatggattggaaaaggactcctctagtcctagctttaggtagcatcacaaactactcttgaaagtttcagtgcctgactctgaaacaaaaggtgtgtttagtggtttagaatgtctctttcagttttctttatgctgctgaagtacttctactaatcattggcaattatgcacttttctgcttatgtttgtttattaatcctctgtatcttcaaactaatttgggggttattgggtcaatatcagttatcagacagtcaaacttgataatgtttcatatttctcatgcttagttaggctcttgagaatccacttccagaaaactgtccaataaccaaggcagattactcttaaacctctgatttctcatatcttcgaactagtcatgcttctagaaaaaaaaaacaattacgtgtcatgtttccagcagtaaactgtccaatgaccaaggcagattactcttaaacctctgattacatacttttctgacaccttaatttaacttagatttgtattttggcttgcatagattcacgcaccagggtttaatttgggtttcaggtacaagaaaggacaccaactgctaattaacctgccatgcatgcatctgaactgaagcaatgtcaggttcactaataaacacgtcttaaacaaaatagagatactctcaggataaaggactccaacttaaacaaaacaaaacctgtggccaaaaaaagtcttttttttttgcatcaaatgcattactgaagaacagaaaataaagcatccgagcagagcgaagcagatatgaagtaccatagggtcagcacgctatttaacattggcatggaatgtaaatgaatgtcattttcacctccatactcacaaacatatgactggtagaccacgatgaacactggtaaatacgtttactcaatttctgtgacatataacttttggggggaatacacaaaaagcttgtgtaggtttgtattaagatgagtaacagatgataagtatcactttcataatcattttccaaaatagtaggtacagatttaacttttactgaaataatgcccactaatatgacaatatacaatgacaataatgccattctagtgtttgttatttgacacaaacagaaatgtgtcgataaaattcgaaacaacaatgtttgggttgctcagctgtcagattcatgaaaagttatcaacttccaattatatgaagggggtgttctgtctgcttgcatcaactacgatcactttctgcagtgagacctaccaaatctatgcaaccaccaatcaggattcaggaacttcagattagaaactttaaggaaacacgcaatgatcagcatgatcaagacatcatagtgtctttcagataccggtgacccaaaacttcagactaaaggcttgtttggatcagtgccctaccaattttttggaagttttggcactaccaattatttggtagaataaatttgtattcatcttatttggtttgctaccaaaatgtagccaaattgtgatatcatagtgaagaaagttctagattgctaccaaatttaggatgggcattaccaaaatgttggcatcagtccaaacaaatggcgggtactatttaggctaccaaaatattggtagggcaaattttggtagcaatccaaaactacccaaaaacctttcgagtatctttacgatactctctactagtagtatttcactaccgtggtagaactagaagtgatctttttcgttcatttatgagtactactattaatataaaaaacattctactctgcagttgatgcggtagtataaatagatatgacccattaatttaaaaaactaaactgtctagattggttcacctaccattaaagaaaaacacctcaaatctttaaggttgagatgaatggtgcagctagaagaatgtgaaggattaaccaaatcaaagtttaataaaacactaataagtaggattataatctactacttcctccgtttcacaatgtaagactttttaacattgcccacattcatatagatattaatgaatctagacattattatatacatagattcattagcatctatatgaatatgggtaatgccagaaagtcttacattgtgaaacggagggagcggtagttttagagtacatgagtggggtggtattgaccgaatctataacggcacgacttgtgcttgacgatgcggggcttcccgccatggccgccgccgggcgccacctcgacgccggtgagcatggagaatttcatcttgtcgtgctcgccgacgcagcaagggtagctgcacgtcccgcggcgaacgacccagaacaccttggcgacgcacagcttgccgccgccgaggtgcacgacgtgcgacgcgacctcccgcggcgccgccaagcccttccactcgccggggctcgccaccgagaaccccttcgactgcacgctcgccgccggcgcccgcggctgtggggacgcggacacgtcccacgcggcgaggacggtgtcgtccatctccaggaagccgacgcagaggccgtgctcggggacatgctcggcgcggccgcggaacggcagcctccagtcgccggccttgctccacgccgcgctcgccgtgtcgaacgagtaggtggcgcggtcggtggacaccaggatgtgcgagtcgccgatcgccgcgtacccgtggatctcgccggcggcggcgtcgtgcacgaacggaggcggcggcatggggcgccagtggcgcgcctcctcgtccgcattcgtcatccacccggaacggcgttcacggtggacgagcgcctcgaacgaatactccggccgccgtccctcgccgccgccgaccttgtcaggatgaggtggcgtcaccatgacgtacaggtcgccggcgacggcgagcgacacggtcaagaacttgggcgatgccatggggggcaacgagcggacggtgtgcgcggcggggtcgtagaggatggcgcggcggccggtgtcgtcgacggtgacgatcttgtcgtcgctcgtgcgcatgaagttcatcgacgcgctgaagcccatggcggctggaggcaggcgagcgtcctccaccgccgccgccgccgccgacgacgacggcgacgctcggggcagttgatccttggggtagaagagacgtgacgtgtcgatgcggcgtagcctctgggtgagcgagttgtcgccgcagaggtcgaccatgtagaggaaccgccggatcatcgtcgtcgtcgtcgcaaagccggccgggttgccgtcggtggagctcgtccggaggcaggcggcggcggcggcggcggtggggcaggacagggcgaaaaccgagagagacgcggagggaaggaagacgagtccgtccgtgcgcagtacgtgaacgttgaccccgtttgctcctgttgtgggtcccacttggggtacaagtttttcctttgggggaagtttttaaaaagaattgaaattttagagggataagactgcttcgtttgattagaagatatgagagttatggtggaatagggatggagaattgttggaaaaactcctttctaataggaggggtggtaattgggaggaaattcctcctttattttgtctaaacaaaatctcaaccatttattttttatttaagatttaatctccaactaaaatccctattagttccaaccatctctaccaaacaagagtttgggactaaaaataaaattttcatattaatttcatcatcaattcactcatctaactccctattatttttcctcaagttgttaaacaagctgctatagcaatttctttttttaatacttatataaattagtatattatagttatagaatagttacaacgaaattatataataactactctctccgtattttaatatacgacgccgttgacttttcgatcaacgtttgacaattcattttattcaaaatttttgtgcaaatatgaaaatatttatgtcatgcttaaagaacatttaatgacgaatcaagtcataataaaataaatgataattacataaattttttaaataagacgaatggtaaaacgttggacaaaaaattaatggcgtcatacattaaaatatgtaggtagtatattataattagatctgaaagttttctactaaaagaacttaccacagttttaccaagttttccactaaaagaacttaccaagttttacagatagtccctagtatttatttagtgttgtttttacattaagaattgtgtttcttaattagctagcccaacacattaagaattgtgtttcttaataagctagcccaaaagtacgagagagggccaaatcaacaagcatactcctctttgtgtataatatttgcaatcaaatttgttgtatttattcgtatttatataggtaaaatttaaatttacgtgtttgtctttatattgatctatctcgtaaaagaaattgtaatttttaatgacttttagacaacatacgaacgtcatctcctcgagtggcagaaaatcacatgctgcttatctggaatggtgactgccatttgtttccaccagtatacgtttttggcacattgaacgttctcttctgatgagtatttcaggttataaatgtttttatctttcaggtgcttcacaaaagaattgcatccttcaaatcattcatgtctgtcaaaggagtttacagagctttgcaatacagagttcttagagctaaccgataaattaaactgtgtcgtataaaaacagcaggattagacgctcttgttctcggtgcgtacgtttccagaactattaaacagtgtgtgttttataaaaattttttatagaaaagttactttaaaagatcatattaatttatttttaaaatctaaaatagtttattctcaattaattatgtgctaatagttcactcattttgcgtatcttttttttttcatctcctctaaaacacaccctaccctaagtaggattacctactagtattagagtacataacaggggatgtggtgttcaccgaagctgtaacggcacgacttgtgcttgacgatgctgagctccccgccacggccgccgcgcgccacctcgacgccggtgagcatggcaaatttcatcatgtcctcctcgccgacgcagcaaggacagctgcaggtccccgggcgcgcgaccatgtacagcttggcgacgcacagcttgccgccgccgaggtgcacgacgttcgtgccgtacggcgcctccggctccggcacctcgaagaccccgcacccgggttgcgccgccggcggcggctgcggctgtgcgacggtggaagcggacaggtcccacgcgccgagcacgccgtcgtccgccgcggagaggccgaaccagaggccgtgctcggggacgtactcggcgcggccgcggaagggcagcgcccagtcgccggccttctccacgcggcgctcgccgtgtcgaacgagtatgcgccgtagctgtgggtggacaccaagacgcgcgcgttgtccggtctccatgacgtagagatcgtcgccgacggcgaacgactgggtccagaacttgtactccaccatggagggcaagacgcggacggcgtgctcggcggggtcgtagaggatggcgccgccgacgatcttgtcgtcgctcctgcgcatgaactccgtcgacccgcagaaggtcacctctgtcggaggcagcgggacgtcctccaccgccgccgacgattagggcacgggcagtgcatcattggggtagaagagatgtgatgggttgatgcggcgtagcctgcgggagatagggccgtgtgatctgtcgaagttgtcgccggatcatcgctgtcctgggctccaagatgccggcggcgattgggcgctgcccttccgcggcagcagctgccgccgcgccgccgcgctcgccgaccgcatctactcctcgttcgcaaatgctaaccccattagcagattgggaacaattcccaataatcgctccggcatcttggaaaaaaagaaagcgaagaagcgatttgggaagacgaagaaccggcgattcctctacatggttgatttccgggctgtagacccctccttccagaggctacgccgaatcgacccatcaagtctcttctacgcagacccggcggcggcggcggcggcggcggccgtggaggacgtccgcctgtctccagccgacatgaacttctttcccccccggtagcgattcggagacggacaacctcacgtggatgaagatcatgcgcaggaacgacgacaagatcatcgccgtcgaccatgctggccgcacgatcgtctacgaccccgccaagcacagcgtcggcgcgttgcccgccatggtcacgcccaagttccggacgctgtcgctcgccgtcggcaaggatctgtacgtcatggcggtgtcacctcgccccgacggcgtcaccgaccgttctttcgaggcgctcgtccgttgcaagaaggaggcagaggacggttgcctctggcgcgccatgccgccgccgccgtacgtgcacgccgccggctacgagaacgccgtcggcgacacctgcgcgtacgcggcggtcggcggctcgcgcatcctgctgtcgtcgaggaggcacggcacctactccttcgacacggcgcgcgccacctggagcaaggacggcgactggacgctgcccttcagcgaccgcgccgagtacgtccccgagcatggcctctgcttcggcttctccgccgcggacgacgacgtcctcggcgcgtgggacctgttctcctcctccaccgtccagcagccggagccgccaccgccggcgcaccccgggtgcagggacttcgccgtgccggggccgtcgcgtcgcagggcgcgcccgtcgcacgccgtcgacctcggcgaatacaccgaggtgtactcgtcgcacgtcgtgcacatcggcgacagcaagctgtgcgtcgccaagctgtacacggtctctcgccgggggacctgcaccgaatactgctgcgatttcgagtcggatgaaaggaatttcgccgtgctcaccggcgtcgaggtggtgcgcggccacgacgacgagcttcgcatcatcacgcataagtcgcaacgttatagttttggtgaacgctacatacccacatctgtactctgacactgcttaggatttgctcaataaacctctgttctgttaatcatgctgtttttgcatgatgcagacttatcggttagctttaaaagctctgcattcgaaagctctgtaaactatttctttcacgatgactaactgtttcactcatttaaatcgggtgttgtttcaccttataaaaaacaatgtttcagcaaatagcaaaagaatgttttagtttactgcaacatttaattcatacatagtaaaacatttttcggtggaacaaaaaataaaacgaattcccttaataggggtttccaaaatatttgtattttttgttggaatggagtatttcagttcactgtaacattatatctactataaagaatgcccgtgcgttgcaacaggtgagtatttttagcgacacatgttttggtgtaatcgagcgaacagagaggaaagatgatgcctgctggatttttcttattttctttcaccctacacaatctagttatcttgtgttacggtaggatggaggactcataaatggacgcagtatcttgagccattcggactgcagctggaggttcacccactgaggagagcgtctctcaacactacaacaataagtggatgtggaccacgtcactagtacagatcctatcatctgtgatgggctcaattatgcctatactacttggaccgtcagaacgaagtcatcttaatcgggcttaaattttcactgttgtagatgtactcactctaggccgcccaagtacatatagcccgtcactgataacactcatctgtgacgggcaaagatttaagcccgattaatatgacctcgcatatctcaattgggcctagacaccgagcccgtcagagatgagagtcatcggtgacgggctataatctaggcctgttagagatgagagtcatccgtgacgggcaataatctaggcccgttagagataagagtcatccgtgacgtgctataatctaggcccgttagagatgagtcatccgtgacgggcttttgtgttggcccgattcagatgtgtcatccgtgacggccggatgctcgattgagatattttctcacatcactgacctttgcttagtgatgggggccctgcccgaaagagatgatgctttaagcccgttagagatgaccaatcccgttctagtgcgtctaatggcatcaaaagtttaatggtgtagagctctataatttcacctaatccttgctccaaattaaattgaccttcaatcgaacgtcaccagctctgatctaacttgaaaaacctcgatctgccgcacccgacctttacgtggcttagtcacccacgatagattcaactaaaactgatacgtcaaaaaaatgaacaaatttattacgtggtaggttaccgctaaggtacgataatggtaattgcatgataaccatattaaaatcaaataaattaaaaaatcatttaaattttttgataaattttatcttcacgatttgctattgttaccgcagtttggatgacaatttggatgatactttttatatttctagttttttactacatatttgcacctactgaaaattgagtctatctcgtgtttgtgattttctgtacaaccagctagctatctcggatgggtgacctatcgggaaggcacacaagtgagatttggatgggtgactgaccgggaaggcacaacaaggctaagcaaaaaaacaaaatttattttttttgtggattatactcatctgtgatgggctataatctaggcccgttagagatgagagtcatccgtgacgggctataatctaggcccgttagagataagagtcatccgtgacgtgctataatctaggcccgttagagatgagagtcatccgtgacgggctataatctaggcccgttagagataagagtcatccgtaacgtgctataatctaggcccgtcagagatgagagtcatccgtgacaggctttgtgttggcccgattgagatgtgtcatccgtgacggccggatgcccgattgagatattttctcacatcactgacctttgcttagtgacgggggccctgcccgaaagagatgatgctttaagcccgttagagatgaccaatctcgttctagcacgtctaatggcatcaaaagtttaatggtgtagagctctataatttcacctaatctttgctccaaattaaattgaccttcaatcgaacgtcaccagctctgatctaacttgaataacctcgatctgccgcacccgacctttacgtggcttagtcacccacgataggttcaactaaaactgatacgtcaaaaaaatgaacaaatttattacgtggtaggttaccgctaaggtacgataatggtaattgcatgataaccatactaaaatcaaataaattaaaatatcatttaaattttttgataaattttatcttcacgatttgctattgttaccgcagtttggatgacaatttggatgatactttttatatttctagttttttactacatatttgcacctactgaaaattgagtctatctcgtgtttgtgattttctgtacaaccagctagctatctcggatgggtgacctatcgggaaggcacacaagtgaggtttggatgggtgactgaccgggaaggcacaacaaggctaagcaaaaaaataaaatttattttttttgtggattatactcatctgtgatgggctataatctaggcccgttagagatgagagtcatccgtgacgggctataatctaggcccgttagagataagagtcatccgtgacgtgctataatctaggcccgttagagatgagagtcatccgtgacgggctataatctaggcccgttagagataagagtcatccgtaacgtgctataatctaggcccgtcagagatgagagtcatccgtgacaggctttgtgttggcccgattgagatgtgtcatccgtgacggccggatgcccgattgagatattttctcacatcactgacctttgcttagtgacgggggccctgcccgaaagagatgatgctttaagcccgttagagatgaccaatcccgttctagtgcgtctaatggcatcaaaagtttaatggtgtagagctctataatttcacctaatctttgctccaaattaaattgaccttcaatcgaacgtcaccagctctgatctaacttgaataacctcgatctgccgcacccgacctttacgtggcttagtcacccacgataggttcaactaaaactgatacgtcaaaaaaatgaacaaatttattacgtggtaggttaccgctaaggtacgataatggtaattgcatgataaccatactaaaatcaaataaattaaaatatcatttaaattttttgataaattttatcttcacgatttgctattgttaccgcagtttggatgacaatttggatgatactttttatatttctagttttttactacatatttgcacctactgaaaattgagtctatctcgtgtttgtgattttctgtacaaccagctagctatctcggatgggtgacctatcgggaaggcacacaagtgaggtttggatgggtgactgaccgggaaggcacagcaaggctaagcaaaaaaataaaatttatttttttgtggattatactcatctgtgacgggctataatctaggcccgttagagatgagagtcatccgtgacgggctataatctaggcccgttagagataaaagtcatccgtgacgtgctataatctaggcccgttagagatgagagtcatccgtgacgggctataatctaggcccgttagagataagagtcatccgtaacgtgctataatctaggcccgtcagagatgagagtcatccgtgacaggctttgtgttggcccgattgagatgtgtcatccgtgacggccggatgcccgattgagatattttctcacatcactgacctttgcttagtgacgggggccctgcccgaaagagatgatgctttaagcccgttagagatgaccaatcccgttctagtgcgtctaatggcatcaaaagtttaatggtgtagagctctataatttcacctaatctttgctccaaattaaattgaccttcaatcgaacgtcaccagctctgatctaacttgaataacctcgatctgccgcacccgacctttacgtggcttagtcacccacgataggttcaactaaaactgatacgtcaaaaaaatgaacaaatttattacgtggtaggttaccgctaaggtacgataatggtaattgcatgataaccatactaaaatcaaataaattaaaatatcatttaaattttttgataaattttatcttcacgatttgctattgttaccgcagtttggatgacaatttggatgatactttttatatttctagttttttactacatatttgcacctactgaaaattgagtctatctcgtgtttgtgattttctgtacaaccagctagctatctcggatgggtgacctatcgggaaggcacacaagtgaggtttggatgggtgactgaccgggaaggcacagcaaggctaagcaaaaaaataaaatttatttttttgtggattatactcatctgtgacgggctataatctaggcccgttagagatgagagtcatccgtgacgggctataatctaggcccgttagagataaaagtcatccgtgacgtgctataatctaggcccgttagagatgagagtcatccgtgacgggctataatctaggcccgttagagataagagtcatccgtaacgtgctataatctaggcccgtcagagatgagagtcatccgtgacaggctttgtgttggcccgattgagatgtgtcatccgtgacggccggatgcccgattgagatattttctcacatcactgacctttgcttagtgacgggggccctgcccgaaagagatgatgctttaagcccgttagagatgaccaatcccgttctagtgcgtctaatggcatcaaaagtttaatggtgtagagctctataatttcacctaatctttgctccaaattaaattgaccttcaatcgaacgtcaccagctctgatctaacttgaataacctcgatctgccgcacccgacctttacgtggcttagtcacccacgataggttcaactaaaactgatacgtcaaaaaaatgaacaaatttattacgtggtaggttaccgctaaggtacgataatggtaattgcatgataaccatactaaaatcaaataaattaaaatatcatttaaattttttgataaattttatcttcacgatttgctattgttaccgcagtttggatgacaatttggatgatactttttatatttctagttttttactacatatttgcacctactgaaaattgagtctatctcgtgtttgtgattttctgtacaaccagctagctatctcggatgggtgacctatcgggaaggcacacaagtgaggtttggatgggtgactgaccgggaaggcacagcaaggctaagcaaaaaaataaaatttatttttttgtggattatactcatctgtgacgggctataatctaggcccgttagagatgagagtcatccgtgacgggctataatctaggcccgttagagataaaagtcatccgtgacgtgctataatctaggcccgttagagatgagagtcatccgtgacgggctataatctaggcccgttagagataagagtcatccgtaacgtgctataatctaggcccgtcagagatgagagtcatccgtgacaggctttgtgttggcccgattgagatgtgtcatccgtgacggccggatgcccgattgagatattttctcacatcactgacctttgcttagtgacgggggccctgtccgtaagagatgatgctttaagcccgttagagatgaccaatcccgttctagtgcgtctaatggcatcaaaagtttaatggtgtagagctctataatttcacctaatctttgctccaaattaaattgaccttcaatcgaacgtcaccagctctgatctaacttaaataacctcgatctgccgcacccgacctttacgtggcttagtcacccacgataggttcaactaaaactgatacgtaaaaaaaatgaacaaatttattacgtggtaggttaccgctaaggtacgataatggtaattgcatgataaccatattaaaatcaaataaattaaaatatcatttaaattttttgataaattttatcttcacgatttgctattgttaccgcagtttggatgacaatttggatgatactttttatatttctagttttttactacatatttgcacctactgaaaattgagtctatctcgtgtttgtgattttctgtacaaccagctagctatctcggatgggtgacctaccgggaaggcacacaggatgggtgacctatcgggaaggcacaaaagtgaggtttggatgggtgactgaccgggaaggcacaacaaggctaagcaaaaaaacaaaattttttttttttgtggattatactcatctgtgacgggctataatctaggcccgttagagatgagagttatccgtgacgggctatattctaggcccgttagagatgagagtcatccgtgacgggcttttgtgttggcccgattgagatgtgtcatccgtgacggccggatgctcgattgagatattttctcacatcactgacctttgcttagtgacgggggccctgcccaaaagagatgatgctttaagcccgttagagatgaccaatcccgttctagtgcgtctaatggcatcaaaagtttaatggtgtagagtgtagagctctataatttcatctgatacttgctccaaattaaattgaccttcaattgaacgtcaccagctctgatctaacttgaataacctcgatctgccgcacccgacctttacgtggcttagtcacccacgataggttcaactaaaactgatacatcaaaaaaatgaacaaatttattacatggtaggttaccgctaacgctaaggtacgataatggtaattgcatgataaccatattaaaatcaaataaattaaaaaatcatttaaatttttttgataaattttatcttcacgatttgctattgttaccgcagtttggatgacaatttggatgatactttttatatttctagttttttactacatatttgcacctactgaaaattgagtctatctcgtgtttgtgattttctgtacaaccagctatcgtgctggatggccttcttcccttctctacgcaacgatgcctgagatcttgctagccaatcaggggcggatctacagtatgaggaccggtgtcaggcgacaccgacgacattcggcaaaacctataacaaaactgcttatctatatattataacaccataatctaagtataattagtatactatgacaccgatagatccgttatgacaccaacgaatcgatttttgatccgccactgtagccaatcatttttgctccatgaaaataggagtccagctttgatttgcatgcatgcaaaatctatccacgtgcaaagatagttatcggtccatcttgatccggactgaccggcccttgctgcgcacagagaacacgtctcgtgcgaaacggaatacgatggatcatacatgcgacctaattcctccgtttcgcaatgtaagtcattctagtatttctcatatttatattaatggtaatgaatctagatagatatatatgtctagattcattaacattaatataaatatgggaaatactagaatgacttacattgtgaaatggagggagtaccaaatatcacggtaaaaacatcttaaattttttaaatatcgtgtttgataattagcatattgacactgttaggcgctagctacatgacgatgtcgatactcgatagagatttggccggctgccaatggaaacggagacggatacagagcaggtcgatcgcatatgtatacgtggatttatgttttttttttgctgggtgagatttcttttttatccatgatccatcaacgccacacgctttggaggaaataaaaaaaatcccgtgcgaagcgagacgggcaggctaggtcgatcgcggccggaagaagcatgtgcgaaacggactcggactacacgtgaagcgcggcgtttggcgcgtgcatgccaacgcggagcggggcgtggctcatgagcgaagcagaatcggataacatgacgtacaaaatagttttgacaaaaacaccttcaacttttataataatagagatatatagtgaaacattatgaatacattaggtgaaacatttttggtggaacatgtcgacgagtgatactcgcggaccggatgaataaagtattagggtacgttggaacaggggtctacgtagtatgacattaaagcagacaaaagacaaggattatactggttcaggccccttatcaggtaatagccctagtccagtttacatgggattgatgatgatgagaacatattacaaagagagtaaccgaaacaggcgataccgacgagatcgtagtcaagggattcgacgagatctcccggcgagttggctccgtgtactccgacttcgtaaactttggtgggtgtgttggcgatgagattcaatgatccttaccgccctcaggggtccccttttataacgtagattatcttgacccccaagcaaagcttgaggatatgtaatctggcacgatatagtagagattctatcccctccgagtaggactccggtagtttcttaactcatagagatattttccatagtttgagataaattcctaacagcatatacggaaacgatccgtgcacgtgaaggttatcggtatattccataagtcgtagtatagagggtatgccttatccgtaacctaccctgacagaacaaaaaataaaacgaattctcttaattaataggaggtttccaaaatatgtggatttttttgttgtaatggcaggtgggagcagagaatacggtagggcctagagcctgcatacacgcatgtagagggaggggcgcacgggggagtgtccgatccggctccgccgcgtcggtcgcccgggagaatcaagagcaagctatgttatttggacggtgaagcaactacgtgcatgcatgcatgcatagtaatgcacaaacatatatggtgctcgattatgagtgaggtgattagcggaagagagataaaatcagatgaataaaaagataaacaacaaaccaattgattttatctgtagcaacttgatcgagttggttgcttggcgcgagcgctagcgatgcgcttgtcaccggactatggcccagcagcagagaaacaaaacgaactaacaaatcaaatcaagtttatctccatcgattgcttctgcgcggcaccgacctcctagactttattttccaccctaaacaaggacgtcgtcggtgagcgagaagacgcgcgtgcgcttcggcggcgccgcctaggtttgccatggctgcagattgatcgtgttttttcattcagaacggaagcaggagggaggaagagagggatggctggggttaccttttgtcgagctgagggagcgccggcgcctccggtgtcgtcgccgtcgctgccgcgccggagaaggggggttggatttggaggaaaaggaaaaggcggcgatgggagggagtcggaacgaatcgaggctgtcgccgtgctcccctcctcccgcgtcgtcgtgtttcctagctgcagctgtcgccgccgggagccagccgatgttgcgccgccggccaccgtcgcggcgccgccgccctcctctctcccgcctcgcctgccggcctcccgccgctttgccttgcttagaaagagagaagaggagaaagagggtgatggcgtggattacgctgacatgtggggtccatgtggatcccatgttctctccttccaggtgctttcctccggctacaggtgactctcgtcattcttcttttcttctggctggcagccgctggcagctgccgtttgcactggggatgcgggaacccggccggagtacggggcccggaggggcccaggggcgtggactaatttcaacccgttcttccctccggggccgggtgaacccgctagcgtgcgggggcggggacgtttctatccaacccaacctcgccctgtcttgttgtcatccatgttcccgtcgccacccactggctggccaagagatagatagaggaagagaggtagaggggctatgacaaaatcacttaggattggatcaagggggtattttgtactttttcgagttcagggggttattcgatcgactacgatagtttcatggggtaattcgtaccttttcctttttaaaatccattatgcgtttatcaaatttaatttgtatgatctaaagtttgcatgatctatcaaatccgtgcaatcaatcgatcattaaactttggattataagattaacaatgtcgagctgtgcatttaatcaagtggatggatatgtggtgtttatctaaaaggtaggagtttgcatgaaaccaaaggaacaaatggctcgtaccgaacaaagcatgcccacgaaaattgtaaaagatatttctctagtaaaccagtccattacttctctactattataaatactgaagatgcttcgtcgaaattttggtacgtcatcgtatttgagttggttttgagttgtttatatgccgttcgcatccaattcaatttgagtctagaataactattatacgctcatatcctagcgcaacccctcctctcagcccaacccaaccgatccacaccatcccacaagcctccactcgcccctctttcgttctctttttcttctttcttttctctcgataattctgatactctccctctcctaccaatctccttttcttttctcctccttttctctctattcttttttttctcccttcacaaataatttttatgcaacaattttgttacattgcaaatgctttccatctacagtaaaaaaagcttttgctaattgaataatgaaaattttaatttttgatctataagatatagcaaaatgcaccgccgttaacttatgaaagtcacccaattaatttgtgaggctatagaaacgtgtatacaagggatatttttgtatgatacgtataaagtgggcgtaacctggttcattgctatatatgattttttgactttgtgtttgcaattgttttgttttgttttgttttattttagtttgttgtttaaattaacaaagtgtttatcaatcctgttgcaatgcatagatattttttttactaactatatataaacttgtaaggaaaattttagtaaataagtcaccgcttagacactaactatatataaacttgtaaggaaaatttaagtagtaaataagtcaccgccgacgggccaacaccacggcggcgaggatgctcgccaacttcgccgccctccccatttcaccgacggcggcgctgagatggaagaagtttggggtggtgatgtttattaaatatttttgatatgtttttttcttttgaattgatatgagattgtgtgagaaagggggtggaattattgggatggaattgatttcctcaaattctaaggcatcttaagatgatgatcatgtagtttgtttaaaatatctctaatagcatactggaaccaacattccaaaattgatctgtcatattgtcatacaaaacatcatgggcattcatgggcttgctacacatcaccgctaagaaatggtccgtcatattgtcatacaaagcatcagggcattcatgggcttgctaaacatcaccactaggaaatggtgaacaaactccacaatatcataaaacgtgtccagccaatcaccaagcaagcatctgtttatattttctatttgtagaacaaagagaagtcgaagtggtcgcaggcacaacagcgggcggcgaagtagcaggtggcaaggtggcttagctacacagggtggcacgggcgaaaccctagccgccgccgcccctcctcctccatcctccgtgcctcgccgctgccggagctcgtcgccggcaaagccgggtgacgcgctgggatggcggcggcggggccattctcctcggctccatctcgcccggtgagggcgtggcgacgatggcggcgggacgacgaggtcgcggcgacggggatggcgcggcgacggcgctgcggtagggctcttcacggcgacggcggcggggctctccgcggcggtcggctccggctctggctccagcgacgggtgacggagttgccagatccggttgcccctctccggggtggccggatctggccggaggcggcggcggctagcggcgagcaaggccacggcggcggaggcggtgggggtcgacgcgcggggagacgcggctggaggccggcgtgtgtgctggccgcggacggtgaggaggctgcggaggccggcgcacgaggaggccgcagtgccgcagcgaaggctcggccgaggagcgttctccggtgccggctgccgcacacctggcaggggggtggctggcggtggcgatggtggtggatgtggctgcgacgaagttcgcgacgacggcggcggactgcggcgcgtgccgcgacgccggtgaccgtgtcaagaacctcgccgccacgagggaggcgtggcgccctcgttaatgctccggccatgaacgccgtgcccgtgaaacctgttccattccaagtgaaagaccagcagctgcgcgccttaccttctagtaaagggcgaatgtttccgggctcgcctcttcgaggggcctccgctcgtggacaacctcgaaaagtcttaatcatcctggtgctatatgaaaaaggccgtgcgtgctagaactctccgtttctggcatgctatagttcttttagtctctcgacgacgggaatgggagatgaccggtaagccagatgcttcgcgaaccaccggctcttcgatctctatctctgcgttgcactccgagtaaagatatacctccattccttttcagaagggttcttccctgtgctataatgctgaactaaggacgttccgccttatctatagaagcttactgggatgatacccctggagggggggatcattcaagtaaggtttctggctctttctttgtcgtaaggtctagagttggacaaccatcatagcactcgcccgctatattcaccctagcccacaagcacaaatcttcggcgggtctctttatatgtcttgtccagaaagaggaggagcacatacatttctttaaaaaaaggtaaagcgttccctcgctacaaagaaacccttcatctagttgacttgaaccccattcaactcaactcgatttcaggttttgctggaggtactaaccacttagtgatcggtccgctagtgcttccttataaaataatatatagctagctgtagtagaaatggggtagtgcattgaccttactcagtttattagtgccatgtgaatcgctagaaacatgtgaagtgtatggctaacccaataacgaaagtttcgtaaggggactggagcagaggaaaggtatagtctcgttaacagataaggaaaagtggatcccgtactgacatagtatagtctattgatacagtatccacccaggctcaaatcaaacgacagtgaggaaggtgagttggatgcctcatgtcaaatgagactttctcctcaccaaattgaagcgtgagcttcctccatgacgccggtgacccgcgctgcgcgctgcacctccagatccgtgccaccccggctgaatctggatgactggcgcctggcggcgctggctggcgacggtggcggctggacggtggtggctgacggtggcggctggcgacggtggtggctgtggcgatggcggtggcggctggtgacagtggtggctgtggcgatggcgggttggcaaggccattacccggggctgacggtgcgtcgtcgacggcggcggcatgtggaggtggggaaggagtctggcggcggggaaggaggagtccgggtgcgggcgcgccgtcgacggcgggaagaactatgggcggtggccttggccgattcgctgaagggacaatgttgttgacatccttcttgcgcggattggtggtgtgggtttgggcagggaatcgcgggcgaaagccttgccgagccgtttggccggctgatgacggcaacgccgtttggtgtcgttcccctccttagaggcgtcgttttagcaaacccctctcttttccctaccatattctccgggtgaaaaccttgttcggttctgaacgagcggtggcacgtcgtgtcctccttgggggcaccactttggagaaacctgttcgtgcaaggattttgttaatggtctatgcattggcttcgaacttcagtcctaggttttgacgaggccttctagctacacattttgttttgcttttcttagtatgggtcctctcttttccggttcggtgtgtttcggttcggtgtgttcaacttgtcttgaactacactctcttttggagtggaactttgtaataattggttgtagctctttttgagcaaaggccgggatatcatattccattatctaaaaaaaatgagtcccagttgaagtggcatgagtcctgtcatcctatcctagattgagttatcttgggacggagggagtactctacttgttatagtagagaaatggggatgcagtgtgtgtttaccgaagctataacagtacggagcgcgccacctcatgccagtgagcatgacgaatttcctctcatcccatacgaagtcgtagcaagattggcttcacactatataaaaacatttgcaatgaaaacattttcgggcgttgtttcataatatataaaaataatgtttcagcaaatagtgaaaggatgtttcaattaactataacatttgatccatacataatgaaacatcacgagtacacttgctgaaacattgttgatggaataaaaaatgaaacggatttccttactagagcgtttccgtgatatgcgggtgatttgttgtaatagtatggggggacagtgcgggagcgcgcgggtggaggcgggcgcccgatttttctaccgctgattgggcgcccgatcactggtgttttcgctaaacatctaccacgtaagagaaaattgggctctgtactaccataagacctataagttcacggttttgtatagtgtagagccttgtatttgggattagggatgtaatcaaactcgacgtaaagtaaagggatgcagagtagacttattcttactacatggccatacagcccaatgaccaccgcagcccacaaatgatgccctcaaaaaccgaatttttttcggttttagattttttttaaaaaaatatttacagaaataatctatcggccaaaaaaattacaaaaatagaccctgccgcccacctctggggcggcaagctgacgtggcaaacgggggaggaacgggcggtgacggagggagggttttttgcaggaaaacccttgccgccctctggtggggcggcaaggggcccgaatgcaaaaaagccagtcggggccggctattttgcaggcggccccttgccgccctctgactgggcggcaggcctcgctgcctataaaaggcctgctgcccagcccccagccctcattcttctctcctcaattccagtgaaaaaaaaagaagagaggggaggagaagagaagaaggggcgaagccctgccggattcagacgccgattgtaggtaatattcatagatcctatatgtgactattgagttaaatagtgtgtattctttaaaaatttgtttgaataaatgcattatatttttagggttttagttgtactaatctagaagtgcgtattgtagatatcggtaactacgtagatctgctagtttggaatcaatacattaccattgcattggcttacacaagaagatattacgttgtagatgtttattgcatgaaagagtaatatgatctagttatttcgttgacagatatgtcgaacaaacaaatattccgtccgttacgggccaactggggtagatctgtcagattttattgtatcagaaaggggaattgatagaccagctgagaggagtgtaccttctataaaaggatggttaatgaggggcttgagagttgatccacagacaagtgacataacaatcaatgttatagtaagtcgggcaactgagggtttttattgggaactaatgccagttcaaaactctcgagtgtggagatggtatttgaaaaatgcattgcaacgcgggtggcctctagctttggttccgtttgttcacccgaaggatccaggtgtgcagatgaacatggatgatggcgagggaccaagtgctgaagtaaacgagacttctgtggaggaggtcaacgcatgagaggacgggggcgtagtagctccaatgggcattcaacaaggtggagtggccgacgagggggagactgtcggtgccattgtggatgaaatggagagggaggattctgacaacgagcgtgtagaggaaggtgattcgtcagatgatgagatggatattaatccagcagaatgggctagtgaggatttttctgggctgatcgtctctgaagaggatagtgtgagatgggagtacaaagaaaatgaggttattcagggagcgatttatagtagagcagaagatatgaaggaggcggtaaaacattttgcagtgtcacttcatagagagtttagggttgccaagtcgaaccggtcgcaatatgaagttcggtgtgttaaggaaaaagatggttgtccctggagagtgcacgcgtataaggggaaatggaaggattattggacattgtcagtcgttaccaagcatacatgttttttacctggtgttcagaaataccacaggaacattacttgtgcatttgttgcatctgagatgtatgcgcatgtcatcgataatctcacatatgaaccaaggtcaataatccgacacatcgaagagatatacaagtatactattagctatgccaaggcctggagggccaaacagaaaataatagagatgagatttggaacttacgaagcctcatatgacaatttgccacgcctgcttggtgttatcgaggaaagaaaccctgggagctcttacgaattgaagaaattcccctcaattgaacatcctagcaagagtgtgctgcaaagggccttcttagctctacatgcatgcaagatggcattcgtgaactgtcgtcctgttctctgcattgatgggacattcttgacaggaaagtatcggggccagataccaacagcaataggggtagatgggaacaatcaggtattgctcttggcatttgcttttgttgagagtgagaataccgacagctggtactggttcctgaaattggttaaaacaaaagttgttggtatgaggccaaatgtgtgcctgatacatgataggcacgctggcattctgcgagcgatagaagagttgcagtttgggagtatggaacgaggataccccggtgtttgggaagatgtacagagtaggtggtgcatgcgtcatatgggagctaatttcttcaagcaattcaagaacaaggagctcatgaacatgttcaagaggctgtgcaatcagaaccaagagagaaaattcaatgagctttggaagagattagatgagttgacagccaaatgcagtgttcagtgtgcagcggctccatcgaccgccgttgctgacccccctcaagctcttggatctctcccaacggatagtccaacattggttagaagaactggattggagattcggaaattttctcagtggattctgcatgaaccaaaagagaaatgggccaaggcgtatgacacaggtggtgctagatatggaataatgacaacaaatttggcagaagtttacaactgggtgatgcgcggtgtccgtggactgccactagttggcatagtggagttcattttacatgggacatgcaggtattttagggatcggttccaggcagttcttccctctatgccgaacaacagcattttgtttggagctttcatgcagaaaaagctagaggagttgcgtaaaaaggccatgaaacatcgagctgtagtgcaaggtacccaacagcacaggtttgagatactatgtcaagataaggcaggcaggggtatctaccgcaagagagtgaagcaggagtgtgttctcaaagccgacggcacatgtcattgctcttgtgcaaagccgaagctgctccacaggccatgcagccatgtcattgctgccgcagcggagtgtggcataccagatacagtatatgtgtcacagtacttcagtaagcaagcaatatatcatacatggagcggcgagatttatgggttcggcatagctggggagttcacagagactaacgatgaagtactcaatattcctgacccatcgaagctccgaggcagggctggaaggaggaggactcgtcgcatccgcaacgatatggacgagtcggaggctggcagggtgaagcgttgcagcaaatgcgatgaacatgggcacacctacaagcattgtcctaaagacaaggagaaaccaagtgcggcggaggcaggactatcaggatcagcagcagatggagctcgccctacgggtgaaggcactacctccactcgaccacgtcctaggcgtcgtcgtgccacgtctggctacgtggtgtagttcttatgttctatgtcggcatgtggatttgcttgtaattcgtttcgaacttatcgatgtgtttatgtttcgtcgtgtaatgtcagacttcggcatgtcatgtctttaggtctcgtgatgtaacgtcggactaaggcgcctaacgtctttaggtatgctgatgtatgtcggacttcgacacgtaatgttatgttatattattgaactctacatatatgttaaattgcacgtcatcgttatgtaccattagtaacgtttgctatatttaaatagcctgtactcttgttgtacataattaatctcatgattttattactatttcataattttgcaagttatcttttgttttacattactattttttgaattgttctaacacgaaacatgtagacccccgtttttataacaggaatcaatcgtgtaaacaataccatttccctggatcaagtagtctggtacacacgaattcatagctgaaataccaagtgcacatacacgagtgtctaatacgaattattacatcataagcccgcaggcgtagtcttaaatcatcggaccgggcggtccggaatacatccaaaagcagaaatagataaggcagcggaattcaggcagcggcatgccattgccacaggcaacgaccgtactaagacctactgagcaccatcgtcttcatctccctcctggtagtaggcatagggatcctccgaggcttcatctcccgcttctgattaattttatatttgcaagggtgagtaccaaccgtactcagcaagccaccacagcaatgatgcacatgacagaggaattcaaaggatggctatggttcttttgcgcaaagtaaattttgtaattcttttcacaagcctaagacctagcatggactgatcaagttttaataccagtgttcatattaaacaatgacggttctgtccaccatccattgtgatcccaaggatagcttcccgccattgagtcgttatggttttctgaggacgtccatattcccgcctctcaggaagtggctccatcagcataaaaatcatcatgcaatatcccatcccacacaagttaaagaatttagagtctagccaagtgtaatacatgtcccggtgctcaataaccgcgagcacggctattcgaatagatttggtttactcacactgcagtggatgtacactttacccgcactccgcgactgcccaacacatgagcctcgtcccaacacatgagacgcgtcacggcaaagcttttcgataacctcgcattggcagtacccgctccatgaacttaaatcctcatgcactctaggcgtccatgtttctagcagtgagtggagttctggcgctcccgggaaagagaagtctcacacgcatattaaattatggttcaagttaagttccctctctcacacactcatggcagtcctaccaatggcgacaccgatgtagggcacgcctctcggccctacctcaacagctgtcccaccgtagcgcacctgcctcactcaggggtgaaccatctatgcagggatactgcctctgctcggctatctaatccgctagttctatacccatacgagaagtgcggatgtacgggggtcgtttcatgcttaacttcatggctcggtccttaattgaccggggacggtactagccttttccagataccacccaaatcctccgtccgccccagtcgaaaacagttgtttaattttatttttcctttcacaaatcatgtcatcaacatcatggcaatgtggcgctcatgtctccacatgccgcatctcaattaccttcccaaaggtaattgcccaagcatatagcatttgataaatatgattatgcataattctagaatagcatttctaagcaattgtcatagttgactagggactcatacgtaaacatggttacaaagatttaagggtaaacaataatcaaggcatggcataatcacaagtgggatgttcatcattgcatgcaattttatttgtaaacaaaacaatttcgcaattgggatcaacatgttcaaggaatagtgatgacttgccttgctcaaagtcttgcgggtcttggccttcgcttggatccgcaactccctcgggctctatagttacgtgcgaaaattgatttgaattcggttagaattcaaataagaatccgaataaatccaaatgacagtcgaatgcgaaagtcgtttcctttttattaacttcactatccgcgaactacggcaaacccaatttcgatttaaactattttgcgggtataaatattttgttgtcataagttttcaatttaatctacccgagcattatatccatataataggttagaaatttctatcgcgagctaaatgtcggacggaatcctaaaattatcttataatattatacgttttaatttagtctatgactaaacgattaaatataatatacgtctaaaattcctagcgattaagtccgaatttctaccgtgaatcgattacttatagagattatccaaaaatgatctatagtagtctataaagattcatctaattgttaattatatctaaattactactgcgaattgatttcttttagaaattaccaagaataattaaattttgcaattctgggaccatgattattctataattaaattttaattattttaaattttctaaactattaaccttcctaattttcttccaaatttttctatttatttttccttttcctttttccccctttcctttttcttttctttttctctttttctctcttttccttttcttttctttcctctctttctttttctctcttcctctcggctctatctctctctctcggctctatctctctctctcggctctccctcctacccgagcggtggcggcggtggacgcggggggggggggggggagaaggagggcggctcaccgacggcggcaacggcgacgacggcggtggcgacggtgccgtacggcggcacagaagcggtggtacggcggcgcgggaacggcggcgcggcggcacgggaacggcggcgcagcggcacgggaacggcggcgcggcagcacgggaacggcggcgcagtggagaggggagaggggaggaagggtgagatggggtgggggagaatggagagagggggggtatttgtagagaagggaggagcggcggggctcggggcggcgcgcggggctcggcgcggctcggtgtgacagcgatggcgacgcgacgatgacgcggcgtggcagcggcgcggggcgcgaggcagcgacgcgatgggcgagcggcgcgcggggcgcggggcgcgagacggcgcgcggggcgcgaggcgacgggacggggtggcagcggcgacacgatgggcgggcggcgcggcgcgggacggcgacgcgcggtgacggcgatgcgacggatggcgcggcaacgggacgggcgcgcggcggcaggcgggcgcgcggcgcggcgacagcgtggcagcagcggcgcggggctcgaggcggcggcgcggggctcgaggcgatgacgcaactgtgacggcgatggcacgcagcgcgtggtgacggcgacgcggcgcggcagcggcgatggcgcggcggcacggggcggctaggggcagaggtgggagaggagggggaaggctagggaccacatcgaacaccttaggtgcaatgaacagtgacttttcctatttatcccgattttagtgtaatttccatataaatttgattccacaattcctaattttacatatatgcattttactcaatattcgtgttatcttaactaatgaattcaccctagattaatattactcacattttatttttatataatttatttgagttttaattagggttaattcttattccatcgcgattaaatttaattgattcaaatatggtcgcgataatattttatttaatactatccacacctaatctttatttttaatttatatttattttaccaatttgtttttaaggtttattcctgattaactgttctttactcacgattaataatcttcgagatcaaatccaggtaaaataggcgaataagatcggcatgatgcaattagtttgaaaagtttttgaaaatccgtatttttagagttttgattttgtcggtcgaattttttttttagggtgttacaaaacactatatttttcagagatggcacgtcaggatacacctcagttgttggacccggcgatagatcaccgacaccggtctcaccttactgcggtgcagggggctcagcttgggacgttctgggcacggacgtgcggtgagctactcacggttcacgactcctttgtcgagaggtacgaacagtgttttactataagttagttgcactgtaatattttttataatgacatattaatttgttattgcaggctacgtgaggccggcctcctaccgatgtgtcggctggtggaggctgcggccggcgacgcgaacccggctagacgatggactgtggacaggtccctcctagcagctttggtcgatcgatggaggccaaagacgcacacttttcacttgccgtgcagtgaggtagcccctaccctacaggacgtatcgtacttgttggggctaccgctcgcgggagacgctgttgggccagtgaccacggctgtggactggcaggatgatctgacggcacgtttcgcactagtacaacgcgcaccgcacttcccgctcaagctgttggcacaccaccgcaacactggacctacgaagaggtggttgcttcagttcaccgtgagtgtttttgtaccgaaatgacaatcgtattacatctttagtccgcagttaaggtgcctaacattttatcgactgcttgcaggttgagcagctacaggcggaggccgacgagtactcctacagccgatgtttggaggcgtacttgctctggctttttggctgggtgatgttctgtggccgtcacgggcacgcggtcgacaagggactcgtgcactacgccaggagcatcgccgacgccgcggtaggcgaggtgcctcagtggagctggggttccgcgttgttggcggctctgtaccatgcactttgtgagtcttgcacgaagacggatcccagcgcgacctttggtgggtgccctctctttctttctatctaggcagctgagaggattgcgatcggccgccctgaggtggaccagcacgcgtacgaggagtcactgtacgaggagcgaccagaggtcgactaccctacgatgggtactctgtggtgccgtcgtcaggtacgttgcatcgatcttatcgtattgttaagttaattgctaagttcattgtacatcacatcgatcatctcgtattgcagcgccgatgggctcacgtccagattaggcggtcgtatcctgagtttgttatggagttcgaccgccttctgccgactgacgtcgtgtgggagccctacagtgccgcggctacccaggctcgtgcgccattgggtctgtccacactctgcaccagggaccaggcgtactggatgactacggttccgatggtcttcgacatctgcgttgagcctcacgcccctttccgcgtgatgcggcagttcggcttccgtcagccctttccagtaccgtttccgaccaccgtcccagctgctgttcaccggtaagatcttgcactacgctttccattgttgcaataatttgtaacatctgtcgtttcacactaatattacacattaattcgtaggtactcgcgcaagggtcagcagtcagctggcgactggcccgccaagttggcgacttttgttgaggactagttactcgcaaccgaggaggtcgtggaccacgagggagagccacacactgaggagtcgtaccaggcctacctacgctggtaccagccacacacccgtactagggtcaccttcgctcccttggagcagcagccccacgttgcgagcactagagacctctatgccaggcaccgcgaccaggacttcgctcgtgctgtgagtaccctgcatcgcaccattcctttatgttttcatgtctttctcttcgtcaaattttacgaatatttacgaacaaattaaccatgcaggttgacgacatcaaccgggtcgtcgttgacggttcaacgacgatccaacgtttaggcgcggggattccagtacccgtagaggagcacctgacgacgtacacgcggatggtggagtcgatgcgctcgattctccgagtgctcacctgtcgtgcagacgacgttgctcgggcagacgcagctgtacagcggccacccgtaccgactggtccccgtccagctgcgcacgttcctaggccgactccccctccgcacggaggtaagtatttttattactatttctgtacatgcctcgcacatataagtgagccgtttcacttgccgattgcttcagggtttcgtgcaccgttcagcaccccgccttcctcggctaggtcttctgttgtgccccccacaggtacttaaaaaaacaacattacttccacaatcaatttacatacattttatgtcttagcttacaagggtcccgttgtcgatgtgtaggtttcacccagttcgctatgacgcaggccgcccacttctcccaggctgcagggtgagcgtcacaggcagccggcacgtcgagtcagggtccaccactggaccatgcttggacctcgtcggaccgcttgctgccttccaccgtgctcttcgacatcactgacttcgacttcgcttcaggctcgacagaggacgtcattggcccctcacagctgggaggcgcaccgcaggtgcagacgcaggaccaggcacaggccactcctccgcgggacactcgtgctacccgtgctgtgccaccggatcgtttcacctactcccaggaccacgtgcgagcacaggcccggaggaccaagcgtggtcgcggcgcggggcagggccagtagagtagtcttctctttgtttacttgcttcactttccagtactgtatgcttttttaggtgccctaactatgaccgtgaggtattttattatctgcatatgcttattcattccgtatgggcaatcgctttattcttcgtaacactactctattcggcagacccgcactacggcttgcgcatacatcgagtgggtcgatacagaaaatcccgttcttgacctaaccacttgtttacaagaaggtcgctggtatttcgcatcggaaagtaatgagaaatacttatagagaaaagcggcttatgaacgacaatgttgtgaacaacagagcgactggcgggtgctaactacggcactccctccatgggaagcccgtccaagatgcaggtgtggtgatcgttgtcaggttcttcgttccataaatcctacaacattgggtcgaaggttctttgtttgtccaaatattcttgacgacgatttcatggtaagaatattttaattacatgaatccttattttctcacaacatttactaactttgcttgctttacatctattctttcctcccaggaaccaccaaggagatgtcaatacagagaatggatagacaccagaagggttctaactccacctagccgtgttgtgcagcttgaactaccagagcaatacagggttactaaagcgcggtttgagagaggagagggatcctcacgtaggggttagctattatcggacaacttggcatattgaaatttctactgtcatgcttccttgtcccattactacatcgtcgttgtgttcaactattgcactacctccctcctagttcgaatctaatatcatctatgtaaccgcaatgcaaatagtcgtatcatgttcaaattgtactactatttcttcatgttacataattctccttgtttaagtccatataatgtttctatgacccagactgcgataggcctatataaattatccgagtactaatacgtcgaataaggtacaaaataatacctcacttaacatatgaaattgcgcaacaaccaacttcaatacatttttataacaatattaacaagttttaccaataaatacttctttatttattattaacataacatagaaaaatcttttggccgtacttttttcatctgggtcccttgccgccccaaagtacggccgcaagctctttatgggcggccaaaattgcaattagcccctgtatgggcggcaagggcctaatcgcaattttggccgacggcggcagacggcgcggtcgacccaccgtctgccacgtcagcttgccgcccaccattatggcagcaggggctatttctgcaattttttttgtcgatagattatttctgtaaatattaaaaaaaaatctaaaaacgaaaaaaattcctcaaaaacctaggcagccacccgtccgcaccgcagattgagatcccatcgccggtcttttgcttcccccgccgccgccgccgccgcattagcaaattagggacgacgatgatccgtcgcttcctctacatggtcgacatcttcgacaaagccggctacggccctcaaccctacaggctacgccgcatcaacccatcacatctcttcttccccaaggatgcgctgcccgtgccccagtcgtcgtcggcggcgacggtggtggaggacctccccctgcctccgacggagatcaccttctgcgggtcgacggagttcatgcgcaggagcgacgacaagatcgtcggcgtcgaccggactactcgccgcgccatcctctacgaccccgccgagcactccgtccgcgtcttgccctccatgctagcgcccaaattcaacaccaaggcgctcgccatcggcgacgatctctacctcatggatatgacaccttggcctgacaagggtgacgaccgtcagggtcgacggtcggggcattctttcgaggcgctcatccaccgtgaccgacgccccctcaatgggggcaggctggaggacgagtgctactggcggcccctgccgccgcctccgtgcgtgcacgccgccggctacagaggcagcagcggagagatccgtgggtacgcggtggtcggcgacgcccacatcttggtctccacccagagctatggcacctactccttcgccacggccaacaccgcgtggagcaaagctggcgactgggcgctgcccttctgcggccgcgccgagtacgtccccgagcacggcctctggttcggtctctccgccgccaacgatgacgtctttggtgcctgggacctgtcctccaccgtccagcagcagccagtggtggcgcaccgcgggtgcaagggctttgcagtgctagagacgccatacgcctcatacgtcgtgcacctcggcgacggcaaattgtgcatcgctaagctgttcatggtcgcgcgccgcgagacctgcagcgaatcttggtgcgactttgacagggatagaaggttttgcaccatgctcaccggtgtggaggtggtgcgctgcaacggcgacaagcttcacatcatcaagcacaggtcgtgccgttatagctttggtgaacactacatccccacttatgtactctaactagtagagtactcctgcttattagttactccctccgtctattatattttgggatggagggattagtcttttaataaatcttaatttggttaatcctgctgtattttgggatggagggagtagtgttttagtaaatcttgattttgttattcctgctgtttctgcaaagctctgtaattgacatgcatgatttgaaggatgcgattttagtgtctctatgattttgattcttttatcatgctgcataagcgcatatagcattggatcatctcaggcaatgtgaaaaacttatttcttcaatcatcattgggtaaatgtgcaatttttgtgaaaaacccatattgctgcatgtaaaagtatgcaatttttaactgttaacaaacatatactcttaacaaaatataagagtgaattaaaatgaaaatatatagtcttaacaaatccttctgtgctctctgttgattataccagtccaaaaacatttagtcaccattttccatgcgattaacttcaagaatgtctataaatttctctggatcaaatccttgatccagttatcttttctttggtccatgtgttttaactgcaagaaaggtcatactagataagtttggcaaacacaatggattttgataacaaactctttgaaggtggggattcttcagcttcattgcaacttgcaggtttaactgcacatcctacttcatcctactttaatatttttcaatgagtaattgagtatattacatgccttcgatcagtgcccctgcatactgtcccagttatatcaacgttcaatccaagtttctgaacagtattgcctgatatagcctcctgtgagtctataatgattccttctccttctgcctgagtctgttggctttcaagtaacacaacattgtcaggaataatgctgcacttttataataattgtgcatattaatttgacgcctcagttcatctttcatctgatccgtgtcagcaatggtattgtgactacatatatgtacttttacaagtggatttttatgatgccagactgggatacagacatcattgtgtaactgaaactattgtatctaaggcatagcacaaaaagttccgatagtcatttataaagttccgatagtgtgatgtcttgatcttgctagtcattgcacggtgcttcttttcgaccataaagtctttatttaatctgatgttcctggttcctgattggtggttggtttacataggtttggtaggtctcactgcagaatgcaatagtagttgatgcaagcaggtagtacacccccttcatatcatttgaagttgataacttttcttgtatctgacaactgaactactcaaactttatctacacatttctgattctgtcaaataacaaacactagaatggtcttcttgtccttgtatattagtatcgtattagtgggcatcatttcactaacagttaaatctgtagttactatgctggaaaatggttgggacaagtgatggttatcatccgctatttctcttaagtcttaatacaaagatacccaagtgatcgttgttgatgctagcagcacacctcctttcatatcattggaagttgataacttgtcatgtatctaataactgaactacttaaacattgttatttctaattttgtcaacgaattcctgtttctgtaaaacaacagacacaagaagggtcttgtccttgtgtattgtcatattagtggcgttgttctagtaacagttaaataagtggttactatggtgggaaatgattatgtgaagtataagctgcatctgttacagcaactgattaagtgaattagccagtgtccatttttcagcctactagtcactatctttgtgaatatggaggtgaaaatgccatgtatatgcattcactgccaagcttaatagtataccagatcatggaatgtgcagacatatgccgcctgatcactactgttatgtatactagtacattagtatctgttttggtctgctcagatgctttattttcagttgccagtgctcacctcactgtcagaatgaggggagcaaaggtttattcagttatgctgcatttgatggaacgatctttggtcttcttttcgccacaggtgcagactgttctgctttgtttaagttgcagtcctacatcagtcctacatcagacattgttttagttcaaatgcatacattcatggaagattagcagtttgttgtcctgccttgcacctgatacccaaattactctggtgaaacctatcctgtttacttccagggtagccaaaacgaaagggttagttgcagtagctgttgttttttggtgatgcactaccaaagtcttcttacatcacattctgctgcagtcttacactttccaaaactagtaatcgtgcactttgcacgttttccatatatggtaaatagcaagaaacatgtgaataccctgatagtttattgtgttttccccaataaatgtcgcatgaaacatacaaatacacaagtttaagaacaatatgttctaacatgatctagcctattttggttaccccctcttggacacttgttgtggaggtgcaaagtagccaacattacaaaatggatacaattttccacaacttaacaaacacttgaaaggctcaaagcaaaagagttgtcttcagatgcattcaagagaactccactaagtaagagaaaataacacaagtatctacacaattgattcgtgtcatccacaataacttcaaatgtaaccctcacaatctgcaatccacaatatcttcaagttgacatggatattttgagctgcattaaaaaaaacaaaattaaccaaagaatatcactacttggagaaaaaactgaaaactaaaccaggaacattgaaatactctcaaactgaataagtatttgtataatttttggaaaagagtatcacatgtgttgttagacatacattcttgaatgagcataaccgatttttcccaaaaaataactaagaatcattagtattttgaaactactttgaacataataaattcaaatagtaagcacaactaaacaaattgtaagccttcaggcttcaggcagctatgcaccaaactccagaaatttttttcagtctaaataaagttgtaatagtgaaataagttatatggtagagcaaaatgttagggtatcaaccaaaatggttcagtttgagtccagcagaaagcgagtttcatgccctcattgtaaaatcaaatacaaatgttatacttccaatacctgaaggacaattttttcctaaggacggtaaacagcctcaacttatgcaagataaggtggcaggcatatacgattttacaatttttatttttaaactttgaagaaagatatgtataacttaaaccaagtcataaaacttgattctttaactaaaatataagtgttaattttaaagggctacagttcaagaatgtccaaatcagataacataatgcaatgtgctatatatcctaagtgtgaggtaataaaaataaatcagataaaaccatggaaacttttgtttgctgagaaaaccaacaattcaaaatagcatccttaagcattcatatcatcaatgatcctgtaaaatgtgaggcacatgatcttctagtagcagattagaatagaaaagactgttgcactgaagaaaatgttgatacctggcctcacacatgatgtaagactgcttctttgttaaaaaaattgcaaatgttattttgcacgtggtaaaaaaggttctagcagttctttatagggataaaaaaaaaagaaaaaaaactacatttggcagtttttaataaatattttgcactgaaggaaatcatgaagttctacataatttagatcaattaagtagaccaaatacaaattcttcgtgttcttcatgaaccacagtgcagtatacatgacaaaaccaataaacatttgaactaaaattgacacagctacagtcaacaggtatactaagcccctctctcaccttttccttttgttttccttattgcaacctttgcttaggatctgtctagaccagatcaagagagcaacctagattaatttaacagaaaaacatcccacaactgatgtaacagaaagaataggcaagcagataatccatcattgataaatgtctgaaatcaccatgttcaacctgcaaaagaaattttgtcaacaagaatcggagatttctgaaattaattaccacactggccatcaaagccaagtagagattgctaaataaaccagccaccgccaagttgtgtttctgcttctgcaaagtatatatgccaagtaacgcttctgcttctgcaaagtagaggattccttcacaagtgattggtcagctttagggcctgtttcgtacagctccaactcctaaatttagcttcaagagttgggtctggcgtggagttgtggagcttcctaaacaacgctccacaactctagtttattttgtgagagagctccacccatctccactcccagttttggtggagctgaaactgtttggctgagctctggagctgtagctgtgccaaacaggccctaagggtcattccaaaagactggaatggtgtgtttgagaaagaaaacaaaggactgcaacggttacattttgcctaaattttcagattaaactgcaggttcattaatagagaaatcgttattgtaatttacatatagctgttgcaatctacagtctaaagtgagggttcacctgggtgggggcagatcctccaccacagccatgtcgcacaccccagctgtgttcaaagagaggaagcgatccgcgcagcctcgagccctctacggagtagggctttgactccacgctgctcctgccataatatccccaatgttccggcttgagaaaatggagacagtgagttgcagatcgagattatgtgtcatcacaatcatgcgagcaacagggtgcaggtgcagttgctggtggcctgtggttgatttccgacggtgtcaggagcagagaacggggaggggccagtaggtggagcagatgctggatcggcttggcctctctggcaggggcgacctcgacggaggaaccaatcggatcaacttggactcggcaacaggcgtgagaaaccggcgacgcgatggggtgcgatcggcggggcagaggttgcagcggcggagaaatcgcgatggagcagcggatgggcggagaaatcgcggtggagtgcacggcggcggcggcagatggggaatacctcggctccgtgggggtctggggaagacctcgcctccggttcagtgcgtggcggtgaaagaaagcgacgacctcgagggtagcggtggattgcggcggcggcggcggcggatggggacgacgtcggctcctgctgcggccagtcgcggcagatggggaagaccacggctccggcggtggttggggaagacctcgcctcggttcagtgcgcggcggaggcggtggagtgcacggcggcggcggcggcggcggcgacggaatgggacgacgacgcgaggaggagtgaggaggaggagcgagtcgcgtgttaagagggtgacgaggcgtattctttgcgcagagaccgtgcgtggagagggtgaaatcgtcgtcggagagggtggatggtacggactacacctgaggtgcgaatggacggtagggatttaacctgatgatttggcatgtaggattactagaggtgaacttctcctttttatattagtatatagatttgacatgtaagattgctagagggtgaactcctttttatacatgtaatatacccgtgctaacgcaatggtgataattgataatgcaaaaaccaaaaggtaatatttaagatcacgaataaaataacgatagagagatttgtattgttctcatgaatgttattatactgtcaataactttccaaagttggccatgaatggagttctgcaatattttcatcactctgagtgaaacatttcaaaacacaaacaatagctcatagtatctaactttttataccacatacagatacaaatatcacctgaaagttttacatgtgctattttttcaatacatgcatcgcctggaaatattcagcaacttctgctcctcactggtcaccttcctccttatagagcacctcaagaagccacatgaacgtctatatcgaacacatatcaggagaagcaccatattgaagacagtgcgttcgtctaccacgaggtacacgcttataaagacatattcatcacttagtattagtaatttaactctcaacatatttggtaaaatatcctggtttctactgaggcaaaaatatgtagcaaagcaaatatataggcattaagcatttaatagcaaatgataataaattatttatttgaactgaaagcgctaggcttttacatggctgcaattttgtttatgtaaatgagttaggtccatctcacagaacctcaatccctattgacccatattagaaaaccctgaatttgagtacaaccgttatatatataacacattaagatgtagaagacactaatttttatatcagtttttataataaactgattcgacaaagctaaccgggtccatttaccatttcataccattttaaacaaactgagagattagctcggagtcatctttgttcagatgcaaggaaagaataaaaataaatactgcaatgttaaacaaaccgagagatcaaaggccaaatagagccagcagcatctcttaatacagaaatatatgatcaaaccccaaagaaagcatgcaccatttaatttctaatttggatgaatggcaatcgagcccattgcctctacatataactttgactgtacattaagagaataggcaagcatgcataggtggtacagtggcaaacagcagaaacggatcaataataatataattctcactcatattcttgtaaactatttaattctgatatataataaaatccagtatcaaccaaaacttttgaaagtgcagtgtgacagtagaattcttctgtttgactttttttgttgaatagtttcagcatatttggttctattttaaatgaacaacaatagacaggaaacctattcatctagatcatagcattttataaacctatgcatctggaagatcaatttgtacaaagcacattactctcttccatttaaaataaactactattttccatgaaggcaaggtataagttacaacgctatgatggcaatacattttaacacaagcaaatttatctatggtgccaatttgtaacaaaggcagaaaaactgggactatcagatcgtaaaaattttctaaacaagtgcataatctcggaagtgaagcctaacctattttctttaacagctaaacacatttgaaacaaaggcagaagctgagacacctgaatagaacaatttgttaagctatttctaaaatctagctgtcgaaacatgatttcggcaataataaaaaggggtagcgcacgagacctaaaagtggatggatgcagagacaaaggatttagacaggttcaggccctctcaatgagaggtaataccctactcctgtttggggatttgaatccgccgggtatgtattgatctgacgatcaggttgtgtcatctatgccccctagagggcctcctgcccaccttatataggatggggggcaggattacaagatagaaaccttaaccaatacggtatcggtttcctaaatcaggactttaggccgttccgtaatatacaaggaaacgtaacacccaagtcatgatctgttacatattacatagatataagttatcccctataactagtcggataaccatgccgtgtgggtatggggtacccataatctccacagtagcccctgagaccttcacagtcggaaagataaccttctctcgaactagattactccaaagccgagtgcttcaatcatcttcgccatggtctcccgagtacttttaccaaatctgaagactgtggagggctgaaaaatatagtcaggtgcatcgactagatgcacctaataggtgtaacccccgactatgtggttaatcgaacaaaccaaacatatagtcaaggaataaataatccaaccaaccgagtggttttgataattatagtcaaccaagcgacttaatattaatatgtagcatatgcggcgtgaatccctgaataatatgatccaagtgatataccgactgttttgtaaaatatgatgaatgtaacctaaagttggctacattattgaaaattcacatagcaaaacagctataaagaagcttgtatgttgtgaataaataaatttccaaagtattgggcatacgccatgcgcacactgctttaacagacgtgctttagtccctaaaagacacatggtttcaccacacctggaaatatatggcatatgtggtgtaaaatccgagtaaataaactcataaaggatttaccaaccgcctagaaaatgaccacaatatataatcagcctaagccataatattggtcaataaaaatgcacacttacgtggcgaaaagcaatgatattgtatccaatcaattgcttaaaaacccaaacagcaccttgacttatatataaaaaagtcagcgggacagctatataaagctttactgtttgacaccttttaagatgcattgtaccaactcctaaaaagttaagtaactgcggtataaaaggattttaaggtattgggcacttgatcacgcgcactttggcctaagcaaaaagtgcctaagtcccaaaaagaacgtgacatgccacacctgaaaatatgggttgcagacatattaggcctaggccaaaaaatatgccttcgacaccctttaaaggatgacgcatgtaacatgctcccgagtaataaatcttccgggtaatatagaccaagcgtagctcatatgaatagcttctgatcttagtgattatcccttatgggatactccaaaatagatgtaacaatcgaatcccgactggcgcaagtattcagttgataacccttacggggaataataaatagtccagtctttgagtatataaaatagacccatgatcatgaattcatgttgcatgtatccggagcaagtccaaattgaagatataatacttgtatttgagctagtaagcccctgagcacgtagtcacaattgttcattgatggtagctgacgcagttggcatagagacaagataaccaatatagagagaatattgcccaccagaggtggcaaaaatattggtggtagtgaagatagtgataccaatcaaaagtactgaagtcgcatagccatggaggcgaagaaaccagtcggcggcagtcaggtcagccagcaatgaatatgaaggcgctcagcgataaagttgtgtagttgacgacgacaaacgcaaccgacatgatgaagatgacgatgtcggtgatccagccaatagcagtgtagcaaccaatgataatgacaaagacgctcatcagcatttgcatagtaggtcaaccgtgaaggtgaaataataagtcggcgaaaacataatcatccattagcaacagcagagatgtcagggtcgatgaagcagaggtgctggtgatgatgtcagtgacaataatccatcaaattaatgttataactgttgtagatgcttcacttggaggagagttgatgttgttgcccaactcgtctaaaccgaaatatttgaagttgttgaagtagaatgtctgctccgaagcaaagatgaagataatgactcctggagttgactcgtgggttgatgaattgatttcttcagcttgacataaaatttgtcaaattttgagccttgtatttgtgtagcccccgactctttgattagttgggaaacaactgaacatagagtcgagaactgtagcctcttgtcgtcgaatagttattgcttgattgaagatatgtgttgaagatgtccaagtagaaatcatgaatgttggagagccacttgttgtagtaaaataacacggcatcgcatgccgagatgtcgagattcacaacaacatcatggttggtgatgtagcaaaacttgtgaagtagcagcaatagagtttgctggtaccgaagataataaagatgaagtcgctctaccatgatgacaaagttgcattgccgtgatgaagtgaacacgagtcgtcggcaacagaagcaaaccggtagtgaagacgcgcagttgtgaagataaaagcactagtcggcggcggcataacacgagtcggcggcggaagacgatgatgtccatcagtagtggtagctgtataaaccaaatgtagaggcgagggcactagtcagcagcagacgagacgaaaggcgatgaagatggtaaggccaatcaacactggcagaatcatgcagccatggaagtgaagaaaccagtcggcagccatggcaaacgtaggcagcttgtgttgaagatactgatgcctattagtagtgacagcgatgtagccagccgtgaagaagatagcatcagttggcgttataacaagccagccgtgcaggcggtgacaccagttagcggcggatgcggcggccggtcggtgaagacgtagacgcccaacaacggcagcataataggccagccgtgcaggcggaaacaccagtcggcggcggtcgaggcggccggtcggtgaagatgtagacgcccaacaacggcggcataataagtcagccgtgcaggcggaagcaccagtcggcggcggacgaggcggccggtcggtgaagatgtagacgcccaacaacggcggcataataagtcagccgtgcaggcggaagcaccagtcggcggcggacgaggcggccggtcggtgaagacgtagatgcccaacaacggcggcataaaggccagccgtgcaggcggaaacaccagtaggcggcggcgaaggcaagccggtcggtgaagacgtagacgcccaacaacggcggcataaaggccagccgtgcaggcggaaacaccagtcggcggcggcgaaggcaagccggtcggtgaagacgtagacgcccaacaacggcggcataataggccagccgtgcaggcggaaacaccagtcagcggcggtcgaggcgagccggtggtggtgttctgactaatccattcctggagcgtaagagataagcttaaagccatgaatcccttttatgcatatctggatatggatcctgcagaacaaacatataggatgagtagtatctgatataaatataatactcgagaaaaaatcaagtattttaaaatatttataaatatgtatttctcctcttgtcaattttgatttccccgagcagatgactctgtacgtttaaacactctgtccgactagtcatagcccccaagcatcgggagtcggcctaggcatttcccaaacatgcatatgagtgacatgagttcgtcattaatggaacaaagtttcacggatcagaatttactactcaggtacttttgcaattattaagagcagaaaataaattatattatctctatgcttttgatttcttccgagtaatacttagcaccttgcgttactcggtccatccaacgagcccccgggtgctaggaatcggcccaaaggcaaccatccattggcaaaccaaacggaaagcataggaagatagaactccataactcgataggtacttttgtactcagattatgtcgcaagcaatcaagataaatattatgaaaattgtttaaaaaatacaatataacatctatagcccccgactcactagtcaacggcgaaccagttgatgtagtgaggcgaaggaaaagacaaaatatcatataaagaataaaataaatgatgacttagctttgtaatattccctcggtgacagcaaaagtagccgatgtgggaacgaagcagtccatcaatggtgacaaaaacaccagtcggcgccagtggaaccaagccaatggtgtagatgatgaagcccattaacagcggcgaagtccgccaatcgtataggcaaaaacaccagtcggcagggcgaaggccagccggtcggcgaagacgtggacacccatgaacggtggtgtgaccaaccaaccgtataggcgaggacaccagtcggcggcgacggaggcaggccggcggtgaagtcgtagacgcccaacatcggcggcataataggctagccgtgtaggcggaggcaccaattggcggcgacggaggcaggccggcggtgaagtcgtagacgcccaacagcggcggcataataggccagccgtgtaggcggaggcaccagtcggcggcgacggaggcaggccggcggtgaagtcgtagacgcccaacagcggcggcataataggccagccgtgtaggcggaggcaccagtcggcggcgacggaggcaggccggcggtgaagtcgtagacgcccaacagcggcggcataataggccagccgtgtaggcggaggcaccaatcggcggcgacggaggcaggccggcggtgaagtcgtagacgcccaacagcggcggcataataggccagccgtgtaggcggaggcaccactcggcggtgacggaggcaggccggcggtgaagtcgttgttgttatcagcaatggcggtggcgaagacaagccggcagagtggactcgcggccgatcgaccggaaagttgagacgcctcgagtccatgaccagcatcaatcgcctcaatagtgccgcgtaattatatgcgaacaacaacaaaaaatagcaagagattaatctgagattaaaaatcaatatgataaataatgataaaaatcagattgagtttccccctgactgatttggatcaagtcagagaagaggagcttgaagaagtggtcgacggaaaggaagtgaaaactcccaaagcaaaaacgaagtcggcgactcatgaaattgattccatcgcgctcgttgataggaagctcaacgcagcccctacctggcgcgccaactgtcgaaacatgatttcggcaataataaaaaggggtagcgcacgagacctaaaagtggatggatgcagagacaaaggatttagacaggttcaggccctctcaatgagaggtaataccctactcctgtttggggatttgaatccgccgggtgtgtattgatctgacgatcaggttgtgtcatctatgccccctagagggcctcctgcccaccttatataggatggggggcaggattacaagatagaaaccttaaccaagacggtatcggtttcctaaatcaggactttaggccgttccgtaatatacaaggaaacgtaacacccaagtcatgatctgttacatattacatagatataagttatcccctataactagtcggataaccatgccgtgtgggtatggggtacccataatctccacactagcaaatcaaatgaaatcaaatcagaaccatggagctgcattagtttgactacaaataagcatgcagatcgatgcgtgagaccctgggtgcagcggcgattgaacctgagatctacttctcttttttttttctgcaatgtgcccctatgccggtatgaagtatgaacacatgtgtgccgtcgttcacctatacagctccaccaatcatgtgccatcgtttttattgacggaagagtagaaaaaaaaatctaataccatagggagattgatttattgcaaggagcagggtaatctggagatggcaaattacaatagaaaataattaaacttactagccgtgaccagctgaatttccagccagtataggagcatctccaaacctccaattatgatattttggctattattataggtctcgagcaagcaaactgatgttgcaatgattttagcttcaaggaaaaaaaattggggacaaatcagctgcatgctaaagatgccataagatttacaaaatgatcagagagccatgatctgactctatccctcccaaggttgcgctcctgcagaacaaaaaagagacaataagcaagtttcaccagcaaaatgcgagaaacgaataataactcattgcacagatttcaattggcaactaaacgttgaagtttctaggataaaatttaggggaaaacttactgccaacatatgggaatttgcctgtgcaatctgccagttagcgagccacaacttctggcccattcccgctcaactctatgatcttgctgcatgcaccaaaacaaagcaaaaatataatcaaaccaagagcacatagcatcaaaagcccctgccactcaaagcctcaacagaagggatgaactgatgcagggaatcaagtacagggacgtactccctctcctcaaggagctccataggttccgagttctcctggaattggcacaaaatttagaaaaaatatcaccattaaattagtagcaatctcatgaggagatcgagattaacagagagagataggatcttgccctgaccagctgcacgattccctccttgcccgtatccgctccacacaccggtccgtcatggtccatgggtgtacctcctcattacagccccgcccttggatatcgagctcatgccgttcgcggccatcctccccggtgcagtggcggcggtcgcctccgcctccactgctagcagttctaggatggcgacctggtggggagcaaagatggcggcctccatggtggctcgtctcaatggaggaggtgcaatggcatccgtaacccgcagtgccggagcggggtagggtttggggagtggtgcggcggtgataggcgaggggcaggggcgtgccggcggcggggtagggtttggggattgggtgcggcgacggttggcgaggggcaggggcaagaatcgcggcagtgatgggtgaggggaacggacgagaatagcggagcgcgagagagaagggtgtttacacccaaatttggcacctagagataaaataggaaaaattgccaaagtttggaagtctgccggttttctccgagtgggccggtctgaccactgtgtgttgagcggtcataccgccggttgagggccggtcagaccggcggcatgtggccggtctgaccagcaggtccgagtccgaatgtgtttcgtcgggtctcaaggtttccttgctcgggaaggcacgtttcgggtttcctttggtttctaccccgagttagacgtggaggagggcctgtagagggcaagaccaacccctatataagggacatggccggttcaattgtaactaatcaatctacaatcaaccaatcgaatcgtttttcatattgcttttagttttctcttagtttgtccatctttgtcgatttgcgctgtaaatcgtccaccgccgctgcgagagtgcaacatctctttgtaggtttgtcatgaaaaccttccgttttcccacgagacgggtagttatctagaaatcggctccgctagcccgtttagttatcaaaacccatgttggtctagtttttgctagatcgaggtggttggcgactctaagatcaccgcaaggcgtaaggtgctgcgatcgtgcttgtcaacttgttataaaaagttgccaacatgatttttggcgactccgctggggaaatctattcaacgtcaactcaacttcaactttgccatgacgaagtcgccgccatccaagtcggaggtggatccatccaacgtgatgccggttacgagggagagtcttgatgaggaagcacgcaaggccttcgatgaacacatgaagaagtacgccgacgagcttttgaagacatgtacaaagactcgtcaaggcacgatcttcaagccagatttggtgtcttcatctactattgataaggtaacttttgaggatttatcgcaatctattcaacaacaagttgctcatacaatagatgaatctatgattgttttaaagaataagttagaagcatcttttgaaaacaattgtgaaaattttatgagaaataaactcggccctctcgtggccgattttatattcaaagataaagcctctaccagtgctagccaagctcccgtagatcaaataaatagtaaaaccgatggagcaaagacacaacaaatcggcgagggtttttcggcgcaaactgccggtcagaccgggccagatggccgatctgaccgggatgccgccgccggtctgacaggcagatgaccggtcagaccgagtattactccggcggtcagaccgggactcaggccggtctgaccgctcctctggatgctggtcagaccgggccctggaccggtcagaccggcgcaatagtgccgattcagggggtagatccaatgactaatgctagttatttgtatcatcttagaatttttgatcctcctgtatctactgctgcaaataatccccaagttcccccacatattcctaatgcttataatgatgtttctagggggtatcctcctgatactaggcaaggccaatataatcatattgcgccgcaacaccaacctattaggcaaccaaatccactaccaaaccaacataggcttgataatatggaggaattgattagtgggattattagggataaatttgggattgaagctaggaattgtgctaaggtttaccaaaagtcgtatcctgattattatgataatgtgccatatcctcgtggtcatagggttcccgaatttaccaaatttagtggtgaggatagtaggaccacatgggagcatgtaggtcaatttttagcgcaatctggagaggctaatagtgatacttttaaattgcgcttattctctttatctttgtccggtactgcttttacatggtttacttctttaccggcaaattctattcatacttgggctcaattggaacaaagatttcatgattgtttctatactggtgaaactgagcttaggttatctgatttaacatcggttaagcaaaagtataatgaatctgtcattgattatgttaagagatttagagatgttagaaaccgatgttatagcttgaatataactgatagagatttggatgatcttgcttttaatggtttaattgctcctattaaagaaagatttgatggccaacaatttcttgatgttagtcaactcatgcaaaaggctttggctcaggaaagccgggttaaggataataaaaaatttgttagaccatatgagaagaagcctaatgttaatgcaattgattactctgaagctagtgatagtgaagatgagggtgatcatgatatgtatgttgccaagtggtcatggactaacaaaaataagccttttgttcactctaatttaatgccgactcctcgtaaagatcggcaaagtgaggttaaatatagttttgatgtggccaaatgtgataaaatctttgattatcttttgcaagaaaaacaaattagattacctaaaggccatatcataccttctcaagaagaattgaagcgtcgagcttattgtaaatggcatgattctcattctcattctactaatgattgcaatgtgtttcgacgacaggttcaatcggccatggatgaagggcgattgaagttcaccgatggttctaagatgaagcttgatcatgatccttttccggtgaatacaattaatttcaatgataagaaggtgttgattcggccggagcaagccgaatctactaaggggaaagaagtgatcattggtgagcctaggccaaagatgatagtgccaaagaaaccggaggttggtctgtggaaggagaatgggagtgaggcttcaacttctaaagctcctaggaagactaaggcgactttggatatgcttttggagaagtatgagaagcaaggtgatgagagagctcgcaacaaaggaaaaagaccaagatcacctcctagggagcgatttggccattcaccaagacggtcgcaatcacctccatatcatcattcacaacacatgtcatgggggccttacccaatgccgccgccgggttatccttatctttactacatgccatggggggcaacaccgccaatgttcaatcatatgcctccaatgcaattcaaccaaaggtggggaggaccaaggaggccaattcatgagcgcttgtcttcaccaaataatagccggttttatggaaaaaatcaggttaatgaagaaaagagggaaggaaagcgtgttaaggtggaggcaaggacttcggaggtgattaccatcaaagtggggtctcatgatgtgccaataccttcgggagatggagttggggagtcctcaagcaacaaatccgaaaccgggaccagctcatcgcagtcggccggtctgaccgggccctctggctggtcagaccgcagctctacggacggtctgaccgggccatcaggccggtctgaccgccggcctcaggtcggtctgaccgggccatcaggccggtctgaccaccgaccccatgtcggtctgaccggcgcatctggccggtctgaccggtggtctacgtccggtttgaccggtctccagcgctggtttgacaagaggttttcaaggagtagtgcgggggcttcatcgtcttcaagtaaactcaatagggggcattacttacctcctggaacagagccgaaacctaggtggatgcctaaggatttaacggctactcaaaggagaaggttgcaacatcttcgggcccaagagatgagagagaaaaaggccgaagagcaaagagataagagattcaatgagttgcgaccaccaccggtttggaggcgtaaatccgtagagaaggaagaactggttgttgtagaggagaaagaagaacaatcagttgctaaagatgagtcatctccaaaggaggacatggatatcaacatggtgtgtatgttgcctatggagttttgtgctatggatgaagccgaggttgctcaattttcactaggtcctaaagatgcggtttttaagaagcccgatgaatcaaaccgtcatatgaagcttctctatctcaaaggttatgttgatgggaagccggtctctaggatgctagtagatggaggtgccgccgtgaacttgatgccgtattcattgttcaagaagttggggcgtgaggatgatgagttgaagaagaccaacttgattcttaatggcttcaatggtgaaccaacggaggcgaaagatatcttgtcggtggagcttaccatgggaaacaagacgctatgaaccgctttcttcatcgccgatgtgcaaggtaactacaatgttattttgggtcgttgttggatccatgccaattgttgtgtgccttctaccttgcatcaatgtttaattcaatgggacgacgatgatgttgagattgttaaagcggatgcatcggccgaggttgcaatggccgatacaacgtttgactggcgtcatgggaatattcaatgcttatcggggagggatctttctagctatgatttcattagtatttcgatggcaaatttgtacctatctctgtaaagccggctagtgtagcacggctaggccatataaatttgtgtaatgagtaaagaagctaatttagagtggttgcaaaagagggtgcaagaatatcggtctacaaagaacgatattggtgagactattgaagattttgatgaagtagagaagcttggacaagggtttacatcggccgatccattggaggaagtagacataggtgatggaactaagccaatgccgacttttgtaaacaaaaatatgagtgccgattataaggttaaaataatcgagctactaaaggagtatgtggattgcttcgcatgggaatatcatgagatgccgggtcttagccgtgagcttgttgagcatcggcttccaatcaaactgggttttaggccttataaataaccacctcgtcgttttaatcctttattatatgaccgagtcaaagaggaaattgatcggttgttgaaggcggggtttattaggccatgtcgttatgcagagtgggtttctagcatagtcccggtggagaagaaggggagtggtaagattagagtttgcatagactttagagatttgaataaagctactcccaaagatgaatatcctatgcctatagccgatatgatgatcaaagatgcctcaggtcataaggtaattagtttcttggatggtaatgccgtctacaatcaaatctttatggcggaggaagatatgtacaatacggcttttaggtgcccgggatttgttggtttgtttgagtgggttgtcatgacttttggattgaagaatgccggtgcaacatatcaaagggcaatgaatttgatctttcatgatttgttaggtattatcttagaaatctatattgatgatattgttgttaaatcggatggtatagatggacatatagccgatttgagattagcttttgagaggatgcgccggtatggtttgaagatgaacccacttaagtgtgcttttagcgtgtcggcgggtaggttcttaggattcatggtgcatgagagaggagttgagattgatcctaagaagatagaaaagattcgagatttcaaagcgccgacatgcaagtaggaggtccaaaagttgcttggtaaggtgaattatttgagaagatttatttctaacctagcgggtaaaatcgatgcttttgtccctatacttcgcttgaaaaaagaagccgattttacgtgggggggggggaaacaacaagaggcgtttgaagggttgaagaagtatttgtctactccacccgttgtgcgggcgcctaaagccgaaaagccttttcggttatgtattgcttccgaagataaagtcattggtgccgttttgacacaagaagaagatggcaaggaatatatcattacatatttgagccgccgtcttttggatgccgaaacaaggtatgtctttatagagagactttgtctatgcttatactatgcttgtaccaaattgaggcattactttttatctagtacatgcatagttgcttgtcaagccgatgttattaaacacatgttgcaaaggccaattctaagtggaagaattggcaagtgggcgtatgctttgattgaatatgatttggcttatgaaccgttgaaatctatgagaggccaaattgtatgtgattttatagtagaccatcatgtagatattgcttatgaggaagaggtttgcttatttgaagttataccttggaagatttattttgatggttcttcatgcaaggaaggtcaaggcataggggtagttttattttcacctaatgggtgtaaggcatcggttcgtttggaatattattgtacaaataatcaagccgaatatgatgctttattattcgacttacaagtgatggagatgattggagctaaacacgtggaagcttttggtgattcggaattggtggtgcaacaagttgccggagtctacaaatgcttggacggatcactaaataggtatcttgactcatgcttggatattattgccaattttgataattttctgaccggttctgagcagagcgctgggggccaagccacaactgatttaaaggccgaattgattgtaacttcggacatttgtgcccaggaagcaaaagaagattggagaattcctttggttcgatatttgaaagatcctacacttaaggttgatcggaaaattcggcgacaagcgttcaaatatacattgcttgatgaagatttatatcgccgaaacatagatggagtcttattgaagtgtttagatgaagatcaatctaaagtggctatgggagaggtgcatgaaggaatttgtggaactcatcaatcggcccacaagatgaattggttgcttaggagagcgggactctattggccgaggatgattgaagattgtttcaaatactatagaggatgcgaagcttgtcaacagttcggcaatgttcagttggcgcccgccgccgtgttgaaccctatcatcaaaccatggccattccgaggttgggctttggatttcattggtcaaatttatccttcgtcatcaaaggggcataggttcgtgctagttgctacggattacttcaccaagtgggccgaagctgtgccgcttaagaatatgactcatacggagttaaatgactttattttgaagcatattatacatagattcggtattccgcaaatattaactacgggtcaaggtgcttcttttatgtctaaggaagtgaagagttttgccgaatcttatggtaacaaattgttgagttcttctccttactacactcaggctaatggacaagccgagttgagtaataagacgttgttgaagatagtaaaaaagaagattgaggaacacccaaagaggtggcatgaggtgctttctgaagcattgtgggcgtataggatatctaaacatggtgccactaaagtcactccttttgagttggtttatggtcaagaagccgttttaccagttgaggtaaatcttggttctcttcgttacatcaagcaagatgatttatcaagtgaagattacaagatattaatgggagacaaccttgatgaagtcatcgacaagcgtttgaaggctttggaagagatagagaaagagaagaaaagggtggccaaggcgtatagaaaaagggtgaaagcaaagttgtttcaagttggagacttggtttggaagacaattttgcctttgggtactcgatctagggaatccagtaagtggtctcctaattgggaaggtccttatcgagtatgcggcattgttcgagggaacgcatattttttggagacacttcaaggggagcgttttcagcgagcaatcaacgggaaatacttgaagaaatgcttcccgagcgtttggcaaaatgcttaggaggtgctatggccggtaattggattatcgctataagaccaaaaacatgttctatgcttttagattcacgttgttcatcaaaaaggcagggggcatgtgtttacacccaaatttggcacctaaggataaaataggaaaaattgccaaagtttggaagtctgccggtttcctccgagtgggccggtctgaccgccttgtgttgggcggttagaccgccggtcgagggccagtcagaccggcggcatgtggccggtctgaccggcaggtccgagtccgaatgtgtttcgtcgtgtctcgaggtttccttgctcgggaaggcatgttttgggtttcctttggtttctaccccgagttggacgtggaggagggcctgtagagggcaagaccaacccctatataagggacatggccagttcaattataactaatcaatctacaatcaatcaatcgaatcgtttttcatattgcttttagttttctcttagtttgtccatctttgtcgatttgcgctgtaaatcgtccgccgccgctgcgagagtgcgacatctctttgtaggtttgtcatgaaaaccttccgttttcccacgagacaggtagttatctagaaatcggctccgctagccggtttagttatcaaaacccatcttggtctagtttttgctagatcgaggtggttgacgttgattgaaggaactaaatcttattcgatcggctgtagatattaacgatatatagtccttacatcgatatatactaaaatcaagtgattgggatagatcggtcgccatgccgagacagtataaatcacttagatcgaaatatatattaataataagactatatatgttcatagcatagccgatcagatagatctagcatgtatcggctaatactccgatactactctatattaagatattagagcaagtagaatatactaaacaaaagcctaatatacttaaatgcaacaaaatcttaatataaatggcagattcaacatatcaatgaagtatataagggaaatatagtgaaatcaggtaagatcggctgaaaccccgatgctaccctaatcggcaaccaagaagcaggctagagattgagattctaatcacgactcataagatcaaactcaactaatgcagctataagtatgaaaagaaggacaatatctagacaatcaagccgttggatgtgtcatagagtggtggatatcttatataatctaagtcaacatcggtatttaacctaatcgactgccttctattgacagatgttagccgattgtaggttagatatcgatatcgccagagattatgtatggtatatgataactcgacgaattacataaacaagattagagtgtcataaagatggaagcactaatcccgagaacgcaagccgccataacaagttttacctcttgtggaagatcgaaaccgatgcagctcaacccgaaagcaagaactcgtcgaaacaaaacgaaagtaaaagggtggcgatgcgccgagattgtattgaacgtgtgtttattcgattacatggggttcgggtctatttatacccgagaattacaaaatatgtccataccagacacgactcttatctgtaacaaactctaagataccataagtcttcgcggcagacttttgcccaaacttatctctaaggaaattacataaaatatcctaattaatagatacaattgacttctcaggactctatccatacgccgcaatcatcatgaagcacatcaacctaaaccgacaacgtttgctgcatcatattgtcggattcggctcaatcggctaacactgtccgactcgaactctgccggtcttagccgtagccgattcaaacttcagccgattcttactctgttttcgcgacgctcttcatctttgattccgctttgatctaatcttctttttcgatgctgacattaccaaatttggtcgttaacacatgccccccaagtccggaatattggataatgtttcggatttgccatatgtcgattccgagagaaatccgctcttgccttttcccgaccgttattccagcgctttaaatactaaccgttacccccgagaaatcacaccgtcttctcccgttttcaccgccgaaaccaactatgctttctctctctccggcgatttctccgacacacaaggcgattcccaggcgacttcatctccggccagatctccgcctgcggcgatgtcttgttccgccagcccatctgccgcgccattagccgagtacactgaggtaagttctcatcggctagatctctctcttttgcaacagattagttttctcctgccttatattgttttcttcttctctattcctgattgcatccgtagcatctgtccaatcttgttgcaattccaagtctgtcgcatgacaaccactatttccttggtccaattggtgattccgaccctactgaattcatcattgccaaaaccaacagaatcccctttagattagcgaaccctaatctgagcgattggaagaacaccttcaagtcttggccatccctcgagaaaacctcccctgagaaaagctggaccacatggtataagcgcgtatcggctagcaagcaggttcattgggatgaaattggaatcggccaggtactcgccctcactatagccaattcagctaaggatgagcccctaatggcagctgcctcttacttctggtctagtgccattaatgcctttttgttcaaccaagggctgatgaccccaactgtgatcgacatcaccatgatcactagattagatgtgacttcatcggctaaccctatgagtttgaacaccaagaaccagtttgatttcaaaaccaaaagcataggtggttggtctggttatgtggcagcatatatgggccaaggatctgtcactcctagggaacatgtggctttcctgctcatgtggttagaaaaattcctcttctgcggaccaggttgtggtcccaccaccaactggcaattcttagccgaagcccttgaaacaaaaaggcaattccctttgggtaaaacccttctcggctacttataccaaatgttgaacaatgcatcggccaaaatagctatcggctcagtggttggagcaggaggaccatggtggttattgcaatcttggctaaatctggtagttatgaaagccgttaatcggccatctgtgacagaagctgaatttccaagactagagccgattgcagatgatgatggagaagaacgcacccaccgcaggtgtatgtcctatggggaatatgcatccacaccagccaatgcaggagcaaagttatcggctgagctgctcaaggactggttctgcagcttttatgaaagctttcaaaaagatgcacgtgtttggttcttctatgagaattcagccgacttggatctcccatcggactttagattcgaagacatcaatcatgagagataccaaaaatctatagaagttttctcaacttcaatcagcccatgtatccttcctgttggcattcatcaaggaagaaatatacaagtttcttatgaattctactatccgatgagctctgccagacagttcggaatgggacagctaccgggagaactccatcggtttctcctaagcaaactcctccaactccttctgctctagcccatttttcaagggtaagcaaccgcctctgattctttttgcaactttctcacttatagccgattgctcacagattttatagttgcaaaaaaagaaaaccgctgtaaagaagaaatcggcagcaccatttcccaaatcggctccaccagtgagatattcttaattcttttagtagttgatcccagctgatttttcctaatacttatctttttgcagcctcctcctcctccttctcctcctgttcagcaactatcaagcgatcaaaccccatcggctgcagggagtcaccatgttgaagaagaagtacaaccaaccactcctgtcatcccagtaagtcttgtctataaaaatcttgaatcggctgaacaactcatcttgataatcaactgtcttcaaatttcctcctgcagatcttagccgatttattctcttttgacatcaaggattactttgatgaggaagcaaaagaagaaacatcaagcaaaactctagcccctctaaatgaagatgtcaagaaaatccttgaagacatatgtcatcggctagggtcatcactggacagtctggtggccgattgtggttcaatccaggcacgatttgcagaaatccaagctttaatcccagatgatctagcgaacaccatcactccagctgcgtaccttgagcaacatcaattcaagctggagaaagctaagcaacggatagccgatcgatgggagcgaaaagacattgaagccactatccaagccaatcggcaacttgtacatgaagaaaaattcaagcttgatcaactgtctgaaggtccgatcaagtccaatattgatcggctcgaagcccgcaagattgagctcttggctcaacttcaagaatgtaatgccgaactggacctggaacacaagaagctagccgatctcccgcgagttattgaagaacacaagacaaggctgaaatcggtcataaaaaacgttgctgatatgaccaagtccttgaaaatcatccctggaatcgatgctcaagatgcccaagctattgaggaggtagaacaaattaggcaaagggctatatcggctatccagcaatatttgtctcagtgacttcttgtgtaataggccttaggaaatttttgtaatcggctaagatgctttggtactatattcaactgtcttgacgatcctttgtgccgattaatataacttcttaacttgctcaaaaattttccaaatttgcaacttgtgtatatatgtgcccccctaatttttacaatgtcaaaagtattgataaaattatagtttgaactaagggcgatataaaaatatcgaccattgtatattggcaaaccacaaccggttacaatatgaaaaacaactaagggcgatataacaatatcggccactgtagatcggcaaaccataaccgattacaacataaaaaaacaactaagggtgatataacaatatcggccatctcaaggcgatgcaaacacatcggctatcacgtatcggcaacactaaccgatcatgcattaacccaaacacttgggtaatatttcttcaaatattttccatttagcgctcgtccatatacttctccatcgagtccttgcagcatgtatgctcccttagacacaaccttatgaatctgaaacggtccttcccaattcggcgaccacttgccgaatttattatcccgagtcccaatcggtaaaaaaaacttccatacaagttcaccttccgaaaaagtcttaggcaccactttcttgttgtaatgccgagcaattcgttccttatccctggtaacctttgcaagggcccttaatctagactgaacaagtcttccctttcatcggccatgaggttataatactcatcggctgttaaatcattttgcaattccgttctccttgagcggattctaacttcccatggcaaaacagccttatgtccataaacaagcttataaggcgggacttggatcgatccatgacaagccatccgataagacaacaatgcttcggccaaccaagtatgccattgccgaagataatcggaaatcttcctcttaatcaacttgatcaaactcttgttagacgcctcggcctactcattagcttgtgcataatatggtgaggaattcaacaatctgatacccatgctatcggcaaactgaacaaactcatcggacacgaaaattgaaccttgatcggttgtaatggtttgagggataccaaatcgatagattatatgttcttgaacaaattgtatagcgtccccagaatcaaccgtcttcaaaggaatcgcctctacccacttggtaaaataatcggttgccaccaatataaacttatgtcctttactcgacggtggattaatcataccgatcatatcaattccccaacctctaaatggccatggtttaatgataggattcatagccgatgccggtgccctttgaatcgccccaaatttctaacaatcttgacaccccttataatatttgaaataatcctctagcattgtcggccaaaaataccctgcacgtcgaagcaaccacttcatcttatgagccgattgatgagtgccacaaatcccctcatgaacttctccgattgcgaccttggcctgatcggcatccaaacacttaagcaacaccccatcaattgtccgataatagagctcattgtccaataaagtatacttcaacgccttatatcgcaacttgcgagaagccgattgagatggattttgtaaatattgatgtacatcatacctccaatcatcggatgtcaacacaacaacctcaattttaacatccttgatcatcggcttatatcccgatgccccttgggccaaatcattagcttcaatattttgctcgcgagatacatgcttcaaagtcaccagccgaaattccttcatcagttcttggcacttttcattataaactattaacgtatcattcttgcactcatattctcctgccaattgactaattactagcaaagaatcccccataatctcgatagcatcggcttcaactttcttgaataactgcaaccctttgagaactgcctcatactcagcttgattattggtcgcataaggtttaatagtataagcaaactcaaaacatacccctcgagggaaaattataactaagccgataccacaaccatgagtacatatggatccatcaaagaataaagtccatggcacaatctccactgagtcgattgaatcatcacgatgatcaactatgaaatcggctatagcttgccctttgaccgccttcggtgactcataccgaagatcaaactcagttaaagaaaatatccattttccaacccttactttcaaaattggagccgataacatgtatttgacaacatcggccttgcatatgacagtgcattcgttggacagtagataatgcattaaccttgtacaggaaaaatacaagcacaagcacaacttctccacaggagagtatctggtttctgcatccaaaagccgacgacttaagtaaaatacaaccctctcctttccttcaagctcctgaatcagaaccgagccgattgacttctctccggccgacagatataatctaaaaggtattcccttctgtggaggaatcaaaaccggaggagagctaagatattccttaatgtcatccaaagctttctattgctctaccccccaagtaaactgttgatcggctttcaacctcaataatggtgtaaaaggctctaaccgtccagacaaattagaaataaaccttctgacaaaatttatcttgtcgatcatctcttgcaacttggttttattttctggaggctgaattttcttgattgcattaacactcctctgagttatctcaatcctcctctcatgaacaagaaatcccaaaaactgaccagccgatacgccaaaagcacactttgtcggattcattttcaagccatatttccttgttctctcaaaaacctttctcagatcggctatgtggtcctctatttccttagacttaacaaccacatcatcaatgtagacctcaaccaaccagccgattagatcatgatatatataatccatagcccgttgataagtagctccagcactttttaagccaaaagtcattacaacccacacaaataagccgattgcaccaggacacctaaaagccgttttatggatatcttcttcggccataaagatttgattgtatcccgtattaccatccataaagcttaaaatcttgtgccctgaagcagcatcaactagctgatcggcaactggcattggatattcatcctttggggtagcgttatttaaatctctaaagtcaatacacacccttaccttaccatttttcttgataacaggaactatactagaaacccactcggcatatcggcaagtacgaataaaaccagcatcatatagacgtttaaactcagccttgacaggttcaagcatatcggctttgcatcttctcggaggttgttgatgtggtctaacccccggtttgataggtaaccgatgttcaacaattgatcggctgagtccgggcatctcataatattcccaagcgaagcaatctctgaattcctttaacagctttatcaacttggttctgaattctgaagataaattcttgctaataaatgtcggccttggtcgatcacctggacctatgacaatttcttccaaatcatcggccgacatgaaaccctgtccttgcttgttatcgagatcatctactatgtccttggtgtagacctttgaaccctccacgatgccctcaaaataatagcttgggttctccatcttcaattggttgtatatcagaatcggacacttttagaaaatctccatcccaaacttttccagacaaacaatccaaatcatccatctcccaaagagctaaatcggcactggcaacgttgactgacctgtcagctggtacaatctcaatcttgtcgccttgccactgaatcaagcattgatgcatggttgaaggaatataacaattagcatgaatccaatcccttccgagcaacatgctgtaagaacccttcccatcgatgacaaagaaagttgtacggatagttttgttgccgacggtcagctccacattcaaaactcctttggtttctgatggattgccaccaaaatccttaagcaccatatttgtcttgatgagatccttagcgtctctgcccaactttctgaatgtagcataagacatcaaattcactacagccccaccatcgaccatcatcttggacatcggcttcccattgatataaccatttatatacaacggcttgagatgccgattttctgtaccctctggcttctcgaagactgcctgttctggtgacaatgtcaatttagccgattcttcttcaacttcatcaacatcggcctgcttgaccccaaactctgcaggcaacgtgaaaaccatgttaaccgatgcaattacaacactttttcctttggccaatctttttgcttcatcagctgtggcttcatcggctgcaggaacctaattcataacacgccactcctgctttggctttgttttctttaaccgatgatcgatttcctgttcgacctcctgaaaatgctcccgactcctcaatctttgaacccttctcttttgattctttgtaaaaataccagaaggacaccattgagttttcctgttttcattgtcctcctggctacgatcttggtttactggacccaatctttgatgaacaggaactcttttctgcctcagccgattgcctctattacatgatcggcttgaactctttgttatatcactgcatccaggacagtcctcaatagatggcagcctcataccttcattccaacaaaatcgaaaaaactcacaaccccaatgaggatcaaagccgtcatcgttttcctcataatgtttctcctgctgcctgtcatatcttttctgatacttcctaataattttagccgaatttgactgaaaacctcttgcacgtcctccattggctgtttgaccagttgtatgcaccatattaacaggaaaaggattgccatcaaccttcatcggcctcttagaatcatcaaacctaattttaccgtcctcaatagctgcttggatttgctgcctgatgaccttgcaatcattggtagtatgagacccggaattatgctacttgcaataccttttcttgcccaactctttggccgatggaattgtatgaccagcaggaagttgaatctgtttctctcggagtaacaaatcaaaaatcttgtcagccttggtaatatcaaagtcatacctctcctctttcccagagttctttacccattggcatagtataacctttttgcttctcacccattcggctgttgctatctcagagtcatcaccatcatcatccaatccatacatgtaaggacaaacgtgattaacctttctagagtttttcctggactctgcaaacctctgttcatgcagggttaccttctgtgtaagatgtgacaagctatcaaagtctttagacgagaatttctccctaatcggaggaatcataccctgaaaagccaaatcgtctaactgggcatcagtcaaactcaagctataacacttattcctcatctctctaaatctctgaatatactcatgcacaggctcatcatgtctttgcttgattgctgttaaatcggacaatttcatctcatgtaccccattgtagaaatagctataaaaatgcttctccaaatcggcccaactgttaattgatccatatggtaaagaagaaaaccaagtaaaggccgatccagacaaagacagtcggaacaatctaacccttaaagcgtccacagccgatgcttcaccgcactgggccaaaaatcggctgatgtgttcataagtcgatgtactatcctgccccgagaattttgagaaatctggaactttgaaccggttaggtaaaggaactctctcaaaccattcagggtaaggctgtcggtataaatttccagcatctttcggcctaagcccgaactgttccttcattacacccgcaatcatatcggcccatggttgttgctgaggtgttccttgaggctgttgtgtcatgggctcgaattgattgtattgaggaacaaactaaggttgagccgatcccccctactgatattgaacttgtggtgatggaggctgatactgataattcaaattgcctccctggtaactctggaaatttggcttaatattgcgtaccaaatgctcgggaacaacttgaggtatcaccgtttgatctggctgtacatgatgaactaggtgctctgggacaactcgattcacagcgtgctgtcctagctgattgttagatgttgcaaacccagccgatgcattcatcaaaccttgctgttgaatcggctgaacaatctcctgttgtcttaacggtgtttgctgaattggttgcaaaacctgccgtcttggagggatctgctgaattgactacacaacttgctggttgggggtgtttgttgaatcggctgtgcaacctgctgccttggtggtgtctgctgaatcggctgctgctgggtcgggtcaacattaggttgaagaggtaagaacatagctacaacctgatcttgcgttagccgattcacattttgtccactatgctgtggttgctctcataccaacaaccgaggattgaccaattgacccggtgctgatggcaatgcagcaggtgcaggagccgataccggtgccgtcgactgagccgatggtgcattaggaggaattgactgagcagctggctgattatcagtaattaatggccgataattttggaatactcctcccagtagataaaccgaccctgtagcttgatactcagccattgaaccatcaaccatttttttcaccatattcgacaaagtgttgactaatattccagattgattgatcaaagcatggtgcacaacatagtcaacctgatcttggaagttgttaaactgtaactgtgctgcgttaccatcttggttaagattaccgccttgaactccctgggaaccatcaccttgaactccaacaccttggaccccttgagagccatcaccttgaattccttgaaaaccatctgcaacacctttatcacacggttgggttgtgccatctggaacttgctgtacttctccatccttagaagaacctgttccgggaatatcagcaactaccttcaccttatacttctgcaccactgtccccttgcgggtctgcatgaatgagtttaagaactggttccgtgcttgctgcatcattgagtcaaaatccttctgttgatcaggtgtcaacttgtctggagtaatggtcacgatgttgccttcattaatctcagataagcctagctgctggatcttttctttaagagaacctggactagccgaggacggcgatgctggcggcttctcggccatggagaaaactgctattgtgattctaacttcttaatgaatcccaccaggcgtgccaaaagcgtgttgatgtaaaacacgaggcctgggacatctgcttaactccagtgcaggttcaaaactcgccttcgggtatgctagcgtgccagttgatttgatcctgtaatcaacaagaaacaaagacaaagaaaccgcggttaaatccataaacgatagccgatcggctaggtgccgatgacatatcatttatatttgagccgatgtcatatatgcatcgatcgacggtcattaataaataagaaggaactaaatcttattcgatcggctgtagatattaacgatatatagtccttacatcgatatatacttaaatcaagtgattgggatagatcagtcgccatgccgagacagtataaatcacttagatcgaaatatatattaataataagactatatatgttcatagcatagccgatcagatagatctagcatgtatcggccaatactccgatactactctatattaagatattagagcaagtagaatatactaaacaaaagcctaatatacttaaatgaaacaagatcttaatataaatggcagattcaacatatcaatgaagcatataagggaaatatagttaaatcaggtaagatcggctgaaaccccgatgctaccctaatcgataaccaagaagcaggcaagagattgagattctaatcacgactcataagatcaaactcaactgatgcagctataaatatgaaaagaaggacaatatctaaacaatcaagccgttggatgtgtcatagagtggtggatatcttatataatctaagtcaacataggtatttaacctaatcggctgccttctatcgacagatgttagccgattgtaggttagatatcgatatcgccagagattatgtatggtatatgataactcgacgaattacataaacaagattagagtgtcataaagatggaagcactaatcccgagaacacaagccgccataacaagttttacctcttgttgaagatcgaaaccgatgcagctcaacccgaaagcaagaactcgtcgaaacaaaacgaaagtaaaagggtggcgatgcgccgagattgtattgaacgtgtgtttattcgattacatggggttcgggtctatttatacccgagaattacaagatatgtccataccagacacgactcttatctctaacaaactctaagataccataagtcttcgcggcagacttttgcccaaacttatctctaaggaaattacataaaatatcctaattaatagatacaattgacttctcaggactctatccatacgcggcaatcatcatgaagcacatcaacctaaaccgacaacgtttgctgcatcatattgtcggattcggctcaatcggctaacactgtccgactcgaactctgccggtcttagctgtagccgattcagacttcagccaattcttactctgttttcgcgacactcttcatctttgattctgcttcgatctaatcttcttttccgatgctgacattaccaaatttggccgttaacaaggtgacggctttttatagcatgaggaatgacggttgcgacggttggaaaggtctgtaataccctccaacgaccattgggagtgaatccccaccgtcagattgaaatctttcatccagcggcgcaaagggggttcggccgaaccaatggcccaaccggccccgctcttcagcaggccgtctcctcgtgggctcctcaatccagatcagtgaattatgggcctatttgatcgtgtcaattctgagtttctggcctatctctccacaagtctgattcttgacagcgtctgattgattgtccgagtgttttgctgtcggttctcctccattttgtacctctttctctaaggtagatagaattcatgtacaaatggaaatagattattctaaaacaaaatatacattgcaagcatagctagttctcctttattttagctatattgacagtcggaattggtcaataacgaccgtcaacaattttcaaaaatgactgtgaacccaaaaacgcttctggaaattttcggatttgtccgaaacattttcggaatctcctaaaaatcttcggttgacttcactgttttgctgttctggaaattttcggatatgtccgaaattaattttcagaattttcgaaaaatgcaattattgggcataacaggcaaatctggagttgtggctataaatagcccactccccttacttgtgagggctgctggtcacattggatattttcatgcccttggcttgttcatcttcagattcacttttgagtcttgctttcttgtttccctctcacttgtgtttgattcggattttggtctgtgtttgagagttgtggattcgagtttgtgtgtgtgcttgttgtaggcttcgtgaagatttgtgagcacttgcatcatctccgggagttcctttgattatttattactcttggaggttgaggactcctaggcggctaggtgtcagtctcgagtcaccgatctacgtgtggtaggccaggagaagtttgtgaagatcggatctcacctccgaaagggaagagataccactagtgaaaggaggagtgctttgtgcaacctcttgagcaaagggttagtggatacccgactctttgtgagctcgtcaacgtagagtagaatcccctcaaggatttgaactcagggaacaactcatcgtgcaacaactttggtgatattacttccccctctcctctagctttgcttgattgtgtcgctaaaggtctagttgcttttcgtgatagcatattcttgttgtaggcagctaaatctagaatttactttgttttgcgcatactctgctattttcggaaattccgaaaatccctacttccgtatttacttgagtttttgaattagcctattccccaggcctaattgaccctttcataaacctcagcgccattttagctagcgctaagtgcccagccagggaccccgcaacagggttgtttggcgagccgggcggcagcggctaagtgccgaatgtcagcgccaaggaaagtggcgctgagctgtagatgtcagcgccaagctccttggcgatgagacccctgccacgttggctgggccatgctggcagcgctcagcgccaaagcggttggcacggatatggccaagctccgcgccaggaggcttggcgctgagcccatggcctatttttggttaaagttctttgcgcgggctaatttcgtaataagtttttcaaaagggtcaatttgtaaaaaaaaagaatggcaaaaactgccatgtcggacgaaaccgcctcctaaaccacggaaggagatcatttacaccggttttcaaagatggaacagacgttatacccggttttgttttgtagttgagggatagattcgaagcaagagttgagggtggtaaaataaacttattcctgctaggctagggaaaggcgcattatgctggacttgggactgggccaccgcccaccgcagtccaataattacggcgttaaagacctagacgaaggagtggtggaaaggaagcagcctcccagattcccacccccccaccatctctccgtaaagctgacggctttgggaaggcgatgatccggcgattcctgtatatggtcgacatcttcgacaaatcacacggccctatctcccgcaggctacgccgcatcaacccatcacatctcttctaccccaatgatgcactgcccgtgccccaatcgtcgtcgtcggcgacggtggtggaggacgcccccctgcctccaatagacatgaccttctgcgggtcgactgagttcatgcgtaggagcgacgacaagatcgtcagcgtcgacaggactactcgccgcgccatcctctacgaccccgccgagcacaccgtccgcgtcttgccctccatggtggagtacaagttctggaccaagtcgttcgccgtcggcgacgatctctacgtcatggagacgataccgctgcctgacaaggtggatctcggccgcgatgcacggccgggccgttctttcgaggcgctcatccaccgtgaaccacgccccgtcgatggcgacaggatagaggacgagtgctactggcgaccactgccgccgcctccgtacgtgcacgccgccggcataagaaccgacggccagatctgcgggtacgcggtggtcggcgagtcccacatcttggtgtccacccacagctacggcgcctactccttcgacacggcgagcgccgcttggagcaaggtcggcgactgggcgctgcccttctgcggccgcgccgagttcgtccccgagcacggcctctggctcggcctctccgtcgcggacgacggcgtcctcggcgcgtgggacctgtcctccaccatccaccaccagcagccgccgccggtggcccaccacgggtgtaagggctttgcggtgccggaggtgccatacgcctcacacgtcgtgcaccttggcgccggcaaactgtgcgttgctaagctgttcatggtcgctcaccaccgggagacctgcagccattcttgttgcgactttgacagtgataaaaggtacttcgccattctcaccggtgtggaggtggtgcgctgcaatggcgacaaggttgacatcatcaagcacaagtcctgccgttatagctttggtgaacactacatccccatttatctactctaactagtagagtactcctacctactgttttaataaacctttatttggttaatcctgctgtttttcttgtaaactcttttattgtacatgcatgatttgaaggaatcaattaattatattttgaagcacctgaaataaaaatataacatttctaacctgaataatcatcacaacatagtgttcaaagtggcagaacctatggtactggagacaacatatgacagtaaccataacagataagcatgagaccaacaagtcagcttcctttttgttaatcaggaatggtactttaggatctgcttatgtggtttagctcgtgtgtctctataattttcattcctttaacagtccgcataagcgcatacagcattgaatcatctcaggcaacgagaataacctattgcttcaatcatcattgcataaatgtgcattacagtgaataacccagattgctgcaaataaaactatgcactttttatctgttaacatagcctacactgttaaaccccctcctcatgtaaaaatcagttggaaataaaataaaaatataatctctggtgaatcgttttatgctctgttgattatggcagtccaaaaacatgttgtcaccattgtccatgtgcttaacttgaagaaagtctactggtatttgtctggctcaaatcctttatccagtaatcttttctttttgatgatagttataaagttagtcaccgttgtcatactcgatacgtttggcaaacacaatggatttgataacaatcaactctttgaaggtttgttcttcagctttattctaacttaggcttaactgaacatcctacttcagagtctttttaatgtgcttggagtattatatatgagatccgttgttcacttctaatctaatggtcaatgataaaaggtaccaattaggagtagttaaaatgtgggccaggtattaatctaaaattttagtggaaggttagataagtaatttgatcctaatatcaaaacacaatttacctctttaaggccggcgcctcaggccgcctctcgtgctgtacacgtaggatagctacagtacgcagggtggaaattttgcaaaaaattcctttgcttttgtataatttgatcaaggtccctcccgaacagtttctctgaggtggtattttacgtgtagggcctgcataaagccggatatttcatgcaaaggagggaaaaatcgcgaattagggctgcgatctaaaatggctctaaaatgtggaagaggaggggctttttcgcaaaaatacgcgcactaatccactccccccccccccccctctcaaaccctagccgtcactccccgcattccctctcccctctcgtctcaccctctcctccctctccctctcccgccgccgccgccgagcgccacatccgtctccccctcacgctgccgcctccacctccgccgccgtcgtgtcgccgtctccgcctaccctcctcctcgtcgtctcaccctctcgcgccgccgccgcctccacctccgccgccgtcgtgttgctgtctcctcgcccctccgtgtccgcctcttcctcgcgccgtcgcccgagcgcaaccgtctccgcctccgccactgccgtcgctgtcgccgagtgctgccacttccgccttcgcctcgctccgcccctacctagcaccgcgccgcagctgccgccgttgccgagcaccgccggagcgccgtcctccatttctgtcgctatcgccgagcgccaccgatgcatccttcgccgccatggctgacgactgctgcgccaagttctcctcgagcagctcgccgcagttgtcgatgaggaagtggcgtcgaatccggcaacatctgacctgctgctgcgcctgcgccactgtcaacaatcgatttcacctgccatgaaaaaacaaaagaaaggtcagttattccggttccctgccttattcgagaggaaaaggaagtattggtgtaggcgtttagctacaaatatggtcatgcagcggcgagagcagagctgaggcatcaggcgtggtgcgcgtcgcttgatggtgcttgccggcactgtcagcaaacctggcaagaggaccactcgatgatcttgtgaacatttacagacggcttttgcatcattaagggaacttgttgcatcatggatgactaggatatcagaagagtgcaagttgtggacttcttctgctctatccaaacaaggaagacttcagatatcctaatatgcatattaatggaatttttagaaataaaattttcagctcctttaactttctgcttcaaatgcatatttcccattccaatgctcctaatggattgtattttgtctcaagcagttgttttagtaaaaaaattgtatgtaatacatgagatagcctgggacagtaatagctcaagaaacaaaactctctttgagcacaaagagaaaagtcctttcaagccgtgagaaacttttgggtacctttttggcctcctatcatatgagctcctttttcttctcccctgtaaatttgtcaagttctacctcactgtaagagagaggagatagagagagatgtactaactgatgaactgatcaatacaagtcctaactgatgaactgtacaaattatatgtgttgcgggagcgagaagttgtgcacagctgagttgggatcagatcatctaatgcttactggagttcaatgtggttattttctatccacgcgatctcaagactttgcttaggggctattacaaacacgagctaggtgggcgacggacctcatattatgacatcgaagtcacttctgactgaggtgtgttttgtcaaccttcagtactcatgtttcatatttaaggtcaatgtgtaatgtcttttacatggctgtttatatctcaggcaagatagtttttgcacttgtaccagcatttgccaccacttattcaattcataagatcccactagccatagtggcaatctcaaaaccactatacatcagtgaatttccatcttatatagctagcttgctggaagatgaggaggtgaacaaatccttcccagatctgtacagttggttctgaccctgagccgcttctagacactacggcgggagttctgcttccattgcctccagattcctgcaactccatatacggcacatattctgttggtgtattccaggtataagtttgttctttgctctggcctagatttgcagttgtttcagcttctgccttatcttagttattcgttttctttagtgtgattcaattctgtagctaccattcctaaagtttgcgttggctccccttttttttcaattggtacatgcagcaggctaggatatcaaggaaacaaggggttgatgaggtgatggacaacagtgcaggatcaacaatgagaacaggatggagcggagagatggatcagtagttcctccaatctacaagtgcatactataccgaacgccacacatgatctccgtttaggatcctcagtagtggtatgtctaacatgatgtggtgatctttgtggaacaggcataggtttgtgtcttaggtgaaaaatagcacatatattattctgatgagaatatatttgttggtgctattttcagcaacacctatgcatttggtggattaatgtttgccaagcagttctattcacctaaaagtcttgatgataccaaaagttggttaatggttatagtagtgtacatggacaacgttgcatagattatcttatctgtttttgcaaggggatattcataccaaattttcttatggatacttctctaacaagaaaaatagtgaattaatttgccctgacaatgatttatctggtatttcctgccatgcgtgtagctgtatatgcggttactctcaggaaaattgtctttgtttgggatgaaaatatgctatactccagatctaaggtgagaagagtagtcacattttttattctctgatttctcaagcagtatatttcactggcagaactagatcccaatacaatttcagtcctattcttttcttcctagactcagctcatttatatgttacttggaacagatatcagtacaatatcaatattttttcatttgattttcgttgtcccgtcaatgtttatatgttagcttatgggacaagcatatatatgaacaggtttaataaagcctcataaaggaaagttgcttcatgattttaagtcccaatggtatttttggggaaacgcttcacatcgagcgtccggagtgaaacaaaatatcgaaccaaaatgtctggtggggcctactattgatttaacccattctttacctccctcctctaatcctgcaaccaactaaccctaatcccatttcctcctcgatccaaatgccctccgtcggcgactatccatctgcccaaccatgttcttccctgacgcggacgacgagtctgacgacagcgacttcatcgacgccctcatcaacccctccgatcccaccttccctaacctgacccccgtcgccgctgccgtcgccatggcttccgctgtgggggggcgggagtgggaggggtcggctcctcccgcagcggtggcggcgagaggcggcgcggctccctccttctatgacgacgaccaggcccgcgtctcctcgggcccctccctctccatctctgtagcgggcacgccttggtcgcgcaaccttcctccctcgccgatccgctcggccagccggagtagaaaaagacagaggtgggtttcgttgggaattttagtgaagttgcagattatttgcatttttgttgcactttgttctatgaagttgtttcgttccgttttgattcattattgcatacattgatttttggtgttgcaatcagtatgttcaattattgattttgttgaaacaaattttgctcaagcaccgaaacatttttttctctgctagtggaactttggactcattgttgcatgcatcgatttttggtgttgcaatcaatatgttgatttagttgaaacaattttgctaaacactgaaacattgttctctgctagtgaaacatttggaacttttttattgaaacaatttttaacaagagatgaaacatgtgaaacatttctcaacaacatggtgcaacaccgtccgatgattttcacaggatcggacgtccgatccgtagcagccttcgtatttttgcaatgcaacagtgaaatcacctttccctgtcctaccaagcgaactcccttcctgatcctcatcaaaaattcgtttctttcctttcttttttgttcagaattgaacaaagaatttggggaagaaaacatcttcccccacttatcatgatagcctgctccagtccccttacgaaactttcgttattgggttgttattgggttagccatacacttcacatgtttctagtgattcacatgacatcatcaaatgatacaagtcttggataagaatctacaacgcactagaacgcccttgttgacgattctttactgagacagcatctagggctcctcgaataatgtgatctcacaccgggtaaatccttaacccttcctcctttggtagaacatatgcgcctttggttgattaatacataagctagtcatggttatatccgagctagttgtgttctcatcatcctccccttcttgattggaaaccgtcctcggtttcaccttgtcatggagcgtattgaatttatctttatctatcacaacatccggtgaggaacatttattgatggccatatggttggatcctgaaatctttatagtcgaaaaccacaacattccccttcttgcaaaccaacatgtaactcatttaaaccactagaggaactagatagagaattacttatacgcatgtgttcctctagacaatacatttcatcatgaaaaggaggtatagttaaattcgaacaaatatatactcgatgcacattacattctcaagtatttaaagaagatagaaatttatgctcttcattcttgctagcaatgtgaataacatgtttaaactcaacacatggcaattcaacaacataactaacatgtttattcactagttgtggcatggatataagtgaagcatcgcacaactcttctttatcacaagaaacattaagcaacttgttttgtgacaaaggtatttcaacaattgtttccactatgggttgctctaatgtagcgcaagtagtggacatagttggcacatcataaatatgcataccttgattagttgtagcaccatcaccattacctttattctcatcttcataaattataggtgcttggccaattgaacattcttcaagcatgcatggagctatggataggtctttttgctcttcgtctttcttctcttcctcctcatcatcttcaacatcggaggtgctgatgtagccatcttccgtagcagcgtatgcccgttgactagggcaaaccttctgcacatggtcaaatccatggcagcggtggcactgaatcctgggcgtgcgtcccgttgaagcaacagatgaggcactcttggtggatacctgtgaagaacctttacctgaatctacaggtcgtgaggaaggtggttttggcgctgcagaaactccatacgcaactggtcacttgctcgttggtgggggcgcccagaaataggtgggcttgggcagccccggagatggcttcgcccgcggcgtgtacgtgcttgccttgttcttgacctgttgatcacgcccctgcaattccttctctccaaacatagcaaactgaaacaactggttcacagtgttaaattccatataatcaactatgtcctgaatatcgcgcctcaatctcgagtaaaaacgacaaatagaatcttcggttccctccactatgctacatcgcatcaatcccttttgtagctcgccatagtaatcatgtacagatttatcctcttgttctaaacacataagtttcttgcttaaatctctaagataagatggaggaacaaatctatcacgcatagctaccttaagttctttccaagtagtaggtaaagctctcccacatctaacccagtccaccaaatataagaaaaatctttaaacttactagtagcttgtcgaactctatgctgctcaggcacaaggtgggcactaaacttttgctctactgtcatctcccaatcaaagtatttctcagcatcataataacccaaaacagatggtattttaaacttaaccttagaataaggatcatcaggcacgcgattattgttaccttgttggtatcgttgattttgagcaccactcatacttgtcattgcaaacacaaaaacaacagcaaacagtgaaggttatccctaataatctgctacgcggtgtagtggtgcctctcaacaactcagccaaatggagcaccttaccaagctcttacaagtgtcttaccagcactgctaaggacggtacaaccggtggctggttcgtgacaccttgaaggacgtgatgtggcgattgcaaggatcaaagtggtgctgaccagaagtatatatgtgaagcttaggaggcacaatatatagtagcaaaggaacgcaattgtgctaatcagaaaatgcaaagttgaataataattcaaagtactagtcaatgtgctggcctagcttagactcaactctagctcaaggaagcacccgacaacactaaggactagatatgaatcaatgcacaactctacactctgaaaacatactcaaaggatgaatgatttttttttctttcttggtgcggctttttttaagcacatttctgccttttttttctttttctaaggtgcagttttttctttccttttctttgcacctttctgccttttctttcttttttttattttttactatttttttcaacaagaactgaccattgacctcaaacagggtctcaaatgtaaatatgaatattacaggtacttaaatgctaagtgcaaaactaaaattagatcacctcaaaaatggaatgctcatgtcatgtaggttccgtttttataaaaatatctcaaatcggcaaccactaaaatacccaacaatgtgatgtaatgccctagaaaaaaagtagaataccgtagaggatatattggaagtccctaaggttttggtgtttgaaattagaagaaaaacaatagttatacgctagctgggctagctttcggccagcccaaggcccaggtgccccctccacaccccctcaaaaccctagaagatcccctcacctccccctagccgtcatttggtaccctgggcgcccacctccccctaggggtgggcagaaaaagaccgaaccgaactaaccgagaccgagaccgaaaaattcggtcacaaattcggtcatcagttgtaactaaccgaattttatacagtcttttcggtcatctcgctcggttaaccgaaataaccgaactggccgaatcactgtaaaggcccaataccagcccaatagcccattagctagagaaaaccctaaccttccttcccacatcacacgatccttcccagtccccacaaccccacatgcgcgtgcagatgcaccgcctcttactcgctctttctcctcctcctccccgcctcctctccgctttctcctcctcgcaccgctcctctccgccttcttctcgcgtcgcgccgccgccttcctcgcaccgtgcctctccgtcttctcctcgcgccgtgccgccttctcctcctcgcgccatgtcgccaccctctacccacacatctgcgcgcccacgacctgactcctgaggcctcgatgacggaaggctaatgggagacacaagatggatgggatctggaccgtggagtggttgagatcgacgggatcaatggctggattgatttgcttgatttgattttttttccatgaatcatgctctacttgctacttgttgtggcatcatcaaattttagtccttcatcccagttgctttttcattcatcatgtacagagttctttttttgcaattattttttgggctgagttcggtctttgaccgagaccaaaccgaattaaccgaagaccgaaatactctatcttgagttttcttgaagaccgatcagtcttgtgatcgtaaagaccgaatttttcaaaagactgaagaacctaaccgaaattttcggttagaccgaatgcccacccctacctccccctctggtcgacctcccccatgcctgccctactgcagacctgggaagaagaagaagggaaggagaagaaagggaaagaaggaagcggagggaatcgaggtgaagatggaaatgaagggtttgattaccgctgcccatggaggctttccccctgttttggttttctattagggtttagatcaagtgttggaagcgagtaagtttgggatccaccgatttattcctcagccaggttttcgctgatctgccccctgcgcagttctgttttggatgccttttcggccaagataataggatttccttcgaaaagtctctatacaaaagttgtaaataacgtgtagatctatcttctgaccaaatggcatgattttatatcaagtggtttaggaggtatcaatttctgaagttggctgtctgaatgtcgatgcatttatctgtagtcgaggttcagagggattttagaggatcttaatgatggaatccgagaatcttgtatttacagaagttgtagcatatgttgtgatctacctcctacataaaaattgttagcttttatcttgtagtttgttgtcagtgctcttttgaatggttgttgcacagttttctgggcagatgcacttttctgttttgtgccatgttttaggccagctaaatggaagaattcagttttgttatctaaatgaaagttataactcttgttctgtagatgtcagaaatgatatattttgctatgttatgtgatgtagaattggaggtatcgagttgttaatctatgctgcttttataggaagattatcggtaattttctttatgttgtttggggtgggttcccagcgtagaaagtgaatgtgtgattcttgaatgattatatgtgtgttgtttgaggctgagtcggtgtttattcaggtggtgccacttcggaacgcaactagagttcatctcgccatcggagaaggcaagtaacgtagcggtggtttgctataactttgacttgttatttgattttacctccacgttgaaattatatatcatcaaccaagattattatatgttatacataggatttacctatatgaatcatacttattgattccttcttgtagcataaatcaaaccttcaccctgaacacaagaaaacactttcggcgccaaatagcctcttgggctaaaccattataccaactaagcttgggcaaagctcaaccttagcaacgggaactggctttgtcatcatatcagcaggattatcatgagtgtttatcttgcatacctttagcttaccttgtgcgactacatcacgaccataatggtacttgatatcagtgtgttttgtcctctgatggaacatctgatctttagtgaggtattgttgatgcaaaaaacacacgctggcctggaagatctgcttagctccagtgcaggtccaaaggttggtaagatgcaggcgtgctagtcagtttgatcctgcaactgacaagatatgaaaatagcagatcaatgaaccgatcggctgacaagccgatggagcaattccagccgatgccgataccagccgatagcgatagggttttgagctatcggttgtatgtccaatgtagattctgatacttgatgtgaataacaatataaaggcaatcagctaataatgataaataacaataatataatccagtagaaaccaatcggctaacaatatgatataatagaacaagtattgatctgaaggttaaagcatacatcggctggaggtccgatgtcataaaatccacaagattagatagatcaatgaaacctttgttgtcattggctaaatccgacttatatgtatatccaatccttataagccgatgcaacgtctagataccttatcagttagcaccccaataaaacattagcatgaacctatcggcttagcaagatttatattatcaacaacaatctagtacgtcgaacctaaccgatgcagcacgagattgtatatgataatctaatactcgatgagccgatagatctgtctaatgtgatggatataacaaatctatttagaacagcattataattgtagagatatattggctaagacagaagatcggacctaaccgagatagtcccaactaaaccaatgcgtctctaaacgcaatgcaactagagatagaattaagatatcaggtaggcaaatatatcaaccgaaccagagcgcgatccaagagatcgaagcgatgcagccttgaacaacaccaatgtagccgacagattcaccagggccggcggaacgtaggacttaccccttcgccggagatcgaactgaaccgatgcagccccacgtcaggtgccaaattccgtcggttgataagtaaaaacctcaggaaagagggtggcgacgcgccgagagtagttttattgattgtgatattgattacaatgaccccgggtgtacatatttatacccatgggtagatactagtccttgtaggactagaaagaaactttcctaaaaataaaaggaaaacataaagtccttaccggacactaaacacactttcctaaaaataaaaggaaactaaaccctgcctaattaatagataaactgccatgttgtatccttcttgaacttggactcttctagataagcttcctttaattgatccgactccaccaagaacacaactgttggactcttctagataagcttcctttaattgatccgactccaccaagaacacaactgctggtgacttgacaactcacatcgaccgattccgagactctgaagccgatattgactctaggccgatgatgattttgggcttacctaattttggcgttaacaggtatatggcactttgattgtcacaaaataggttaatgcaagaatcaactccacaaatctcagcaaacaatcctttcagccaaactgattccttacatgcttcagcaatagccatgtatcctgcttcagtggtagactgggcaacaacaggctgcaatgttgccttccaacttacagcacaactaccaatagtaaacacataacctatgagtgaccttcgcttatctaaatcagcaataaaatctgaatccacatagccaataagtcccttagcagccctgccaaatttcaaacaagcatatgttgtgcctcaaaggtatcagaaaatccactgaacagccttccaatgttctttgacaggattagccatgtatctactgaccaaactcatagcatgagataaatccggatgagagcaaaccatggcatacatcaaagaaccaacagcacaggaatatggaacccttgacatgaattcaacctcctcatcagtactagcacattgtaaagctgataatttaaaatgaggtgcaatctaagtactaacagactttgcatcatgcatgttgaaatgatgaagaaccttcttaatgtaactttgctgactaagaaaaaacaaaccagaatttcggtctctagtaatttccataccggcgacaggcctccacttcgcttatgctagagtgggttggattatgtttcttgggttccctttggattttcgtacccaaagctatgtcagccgtgttattagtctttttgggaggcttgattattggcagtagatggatgtagtcccgggaagagttatgctgcgagctttttatgatgatgttgatatggttcctagaacaatagtgatcaagcaaatacccaatcagggtggtcagggggagtcttggactttctctgtttttgtcctcaacaatgattttgccggcattcaggctccggatgaagatttaccaccaatgggtgccctagatcctgatcttgaaaataatcatagcaatgggccggttcaggaggagcatcttgataatcatgctggtggttggggagattgggagcagcaaggggagaatcaggatcagcatgtgataggggattctggagtgagtcagcagaatcagaatcagaatcagaattcagattctaatggtaatatgcagatagtgccttttgtccctttggttgatcctgctttggaggttgtgttcactgttgctgaagaaggccctttatattttatttctgatgaaacacaaggaaggattcaagaatttttcctcaggaaggagcttctggaaaagttggttaatagtttatcttcctcttttattccgggtttggtgaccccctctgctccatttagtcagttggtactcccaaaaaggaagttgagtaaagatatctcaatacccaggtgacgccaaccctaaacccaaaaaaaaaagggtgcaatcttgtttctcttttccctccatgacaaagcacgcatgaaagatcatcattgtccttagcacagtgccggcgatctagcatatcttgagtattaaacctgtcattgagcaaaagtcaagcaaaaaccttgatcttcatgacacatctggtttttcacaaccagataaaagatcttggaggatggagagattgaaaattgagtttataaactctcctagcagaatacaattctgctctatcttaccgttgcttatttaacctatttgaccatatatatatacctaattaaaaaatacgtaaggtttccgctcccccccttcgtccgtcaaccccccccccccaccgcgactccccatccgttttcgtctctctctctcccccctcccggtgtcccgatctccacacgcttcccctacccgcggccttcttctccctagcgcccctcctctcccgcctccctccctccctcacggcaccccacatctatcccttgcggcacgctctccccctctcccgtgacatctcttcttcttggcatccctcctctcccctgcgttcctaccctcttgtgcgttcaagaaaaacggaacctcctcattcgggaacacgttttgacgtactcatccggccatgttcaccactagaactccccgttgccgtttctctctctatcggtaccatgttgttgttagccacgttcccattattctggttttcttcgttgccaaccaccacaatctatgacgagccacatcgtgggacacgtccgaccaccttactcacccccgtttggtcgctggagcaccgttgcccatcttccctcctcttctatttgttgtgttggctagggaagacaatgaacaatattattcgttttttcttcatcttttgttcttcctgcgcatttaaggaaaacggaatcctctcatccggaaacatgttttgatgcactcatctggtcgtgttcatcaacaaagctcgttgttgttgtttctctctatcaggactacgtcgttgcccgacctgttcatgttgttctggttttctttattgccaacgcccaccatttaacgtcgttgtttttatctctgattgcttcgattttgactagaaaacggaaagaggagatcgagtggatcaaaagctatcaacaaattttggagatcgagaaagattagacctttggagatcgagaaagattagaccggatttgatgggggaggattggctctgtcatcgtatggtcacgtgaccgtgcgagctccaccggatttgatggggaggatcggaaaaggtcgaggacaattgggggcaatctggaaaaggtcgaggacaatggtggaattcaggcagaggtagaggacgatggtggaacaatgaaagaggaaaaggaagagaaaataaacctgaccaaaccaaattttgtcaaacacatggaccaggaggtcattccacagaagaatgttacagtaagttttgtcatatacatggtccgggaggccattccacagaagaatgcaggcaaatgactcacttgttggaaaaacacgtaaatcgatatgagaacaagtatgaaggagctcgtgatcaacgaggacaaaacgccatagaagcaccgcaagttatgaagatagaggcaattgaagaagtgccaaagagagtgataaatgccataactgggggctcttcattaggagttgagtcaaaaaggcaaagaaaagcatatgtcagacaggtaaatcatgtcgggacaagctatcagtcaaatccaccagtatactcaaaaacggtaatttcctttgggcctgaagatgcagaaggaatacttttccctcatcaagatcctttagtggtctcagtggaaatagcacaatgcgaagtgcaaagagtgttaatcgatggaggaagttcagcggatgtgctgttttatgatgctttcaagaaaatgcaaatacgagaagataggttaacaaacgcaggagtacctttacaaggttttggtggacaacaagtacatgcaattggaaaaatatctttacaagtggtctttggaaaaggcactaatgtgagaaaagaagagatactatttgatgtggtcgatatgccatatcagtacaatgcaattcttggaaggtcaacaatcaatatttttgaggccataatacaccacaactacatatgtatgaagctcccaggaccaaggggagtaataacggtccgaggagaacagcttgcagcaagaaagtatgagcttcaaggaacaccaagtgtgaaaggagtacatgtggttgaccaaaaacagggagaatacataaaaatacaaaagccaattcctgaagggaaaacaaagaaagtacagttggatgaacatgaccctggaaagttcattctgataggagaaaacttggaaaaacatgttgaggaagaaatcttaaaggtagtaaaagaaaacatggctgtatttgcatggtcaccagatgagttgcagggagttgatagaagtctaattgagcacaacctagcgattaagtcaggatacaagcccaaaaaacaaaaattgagaagaatgtctacagacagacaacaagctgcaaaaattgaacttgaaaagttgttgaaggcgaaagtcataagagaagtgatgcacccagaatggctggcaaatccagtgttagtaaagaaggcaaatggcaagtggagaatgtgcattgactttacagacctcaacaaggcatgcccaaaagatgattttcctttgccacggatagaccagttggtagatgccacagctggatgcgaactaatgagtttcttagacgcatactctggctatcaccaagtttttatggtgaaggaggatgaggaaaagacatcatttataacaccatttggaacttattgttttatcagaatgccatttggtttgaagaatgtaggagcgacttttgccaggctgataggaaaagttttggctaagcagttaggacggaatgtcgaggcatacgtagatgacattgtggtaaagagtaaacaagcatttacccatggcaaagatttgcaagaaatatttgaaaacctgagaaaatgctcagttaagcttaatccagaaaagtgtgtttttggcgttagagcaggaaagttacttggtttcttggtgtccaaaagaggaatagaggcaaatcctgacaaaatcgcagcaatccatcaaatggagccgccaaaaaacacaagagaagtgcagaggttgacaggccgaatggcatctttgagtagatttctatctaaatcagcagaaaagggattacccttcttcaagactttgaggggggcaaacaccttcgagtggactgctgaatgccaacaagctttcgatgacttgaagaaatacttgcatgaaatgccaacattagcaagtccgccaaaaggtcaacctctgttaatgtatgtggcagcaactccagcgacagttagcgcagttttggtacaagaagaagaaaataggcaagtgccggtatactttgtctcagaagcattacaaggaccaaaaacacgatactcagaagtagaaaagttgatttatgcaattgtgatggcttcaagaaagttgaggcattattttctgtcgcatgacataacaataccatcggcatacccgataggagaagtgttaacaaacaaggaagtcgcggggagaatagcaaaatgggcaatggaactcttaccttttgacctgaaatacatattaagaacagccataaagtcacaagtactagcagattttgtggcagaatggactcccaatgaggtagaacaacaggaagaagtcgaaaaaccatggatagtattctccgatggagcatgcaatgccgccggagcaggagccgctgcaattgtgaaaacaccaatgaagcaaacgttgaagtattctgttcaattagcttttccttcaacaaacaacacagcagagtatgaaggcgttttattggctatgagaaaggcaagagcgctaggggctcggcggttaatagtcaaaactgactcaaagttggtagcaggtcacttttccaaatcctttgaagcaaaggaggaaactatggctaaatatctggaagaagcaaggctgaatgagaaacatttcttgggaataacggtaaaagccataacaagggaagaaaatggagaagctgatgagctagctaaggcagccgcaacaggtcaaccattggaaaattcatttttcgatataatcacccagccaagttacgaaaagaaagaagtagcatgcatacagagagaaggagattggagagaaccgatcttgaaataccttgtcagtgcacaacttccagaaaaggaagaagaagcaaagagaatacaactaacgtccaaaaaatacaaggtggtagagggacagttgtataaaagtggagttactgctcctttgttaaagtgtgtaacaagggaagatggcatgaagatggtggtagaaatacatgaaggcttgtgtggagctcatcaagcaccacggtcagtggcttcaaaagtcataagacaaggaatctattggccaacaattatgaaagatacagagaaatacatcaagacgtgcaaagcatgtcagaagttcggtccaatgacaaaagcaccacccaaagaactgcaaccaatcccgccagtctggcctttttacagatggggaatagatatagtaggtcctcttccaagagcgaagggagatttgcgctttgtcattgttgcaattgaatacttttcaagatggattgaggcagaagcagtggcaagaataacttctgcagcagtacaaaagtttgtttggaagaacataatatgtcgatttggaatcccaaagcaaatagtatgtgacaatggaaagaaattcgaatctggaaaatttcaagacatgtgtaaaggccttaatttgcaaatcaactttgcctctgtaggccatcctcagacaaatggagctgtggaaagggcaaatggtaaaatcatggaagctatcaagaagaggttagaaggatcagcaaaaggaaaatggccggaggatttgctatcagtgctttggacactaagaactacggtagtaaggtcgactggcatgacccctttcagattggtttatggcgatgaagcaatgactccaagcgaagtaggggcacattctccaagaatgatatttgaccaaaaagatgaagaaggaagagagataactcttgaaatgctagatgaaataagggttgaagctttggagaagatggcatcatacacagaaggaacaaagagctattagaaccaaaaagtaaagacaaggccgattgaagaaggagatttagtcttgaagaaagtgctcaatgaggtagctgttggaaaactcgagtcaaagtgggaaggaccattcatagtcaaaaagaagacagaaacaggagcattcaagttagcatatcttgatggtgatgagttaaagcatacttggaatgctatttctttaaagaaattttatgcctaaaaaaaagaaaaaaaagagagagaaagagaaaaaggagaacacgggagctcgagtttgtagtatactcactcagatgtaaatacgaatgatatccaagttaatgtatataaacaggacgtagggtttttatccataatggaggcccgaacctgtataaaaaacatgcctctgtgtatgattgcaatagaactccgcacgctcggagtcgactaacaaagtcgacaaaatagaactccgcacgctcggagtcaaatactctcgactaacaaagtcgacaaaatagaactccgcacgctcggagtcaaatactctcgactagcaaagtcgacaaaatagaactccgcacgctcggagtcaaatacattcgactaacaaagtcgacaaaatagaactccgcacgctcggagtcaaatactctcgactagcaaagtcgacaaaatagaactccgcacgctcggagtcaaatacattcgactaacaaagtcgacaaaatagaagtccgcgcgctcggagtcaaatactctcgactagcaaagtcgataaatttgaactccgcacgctccgagtcaaatacaccttgattactcaatcaaagaaaactcataacttcgcacggttcggaggaagaatacagctcgattacttaaaaagcggaaaatccgcgtgacgaggtaaaacacgtttcgacctcatcactccttcgaaaggtgaggaggacggcggttttcgaactattttgccttagtcctaaaaccagctcaggaatgctcgaactctattctcgttcgagctcaaaaagcggaaaatccgcgtgacgaggtaaaacacgttccgacctcgtcactccttcgaaaggtgaggaggatggcggttttcgaactattttgccttagtcctaaaaccagctcaggaatgctcgaactctattctcgttcgagctcaaaaagcggaaaatccgcatgacgaggtaaaatacgtttcgacctcatcactccttcgaaaggtgaggaggacggcggttttcgaactattttgccttagtccaaaaaaccaactaaagaatgctcgaactctattttcccctcgctcgagctcaaaagacggaaaatgcacgtgacgagataaagtacgtttcgatttcgtaacttcttccaaagataaggaggacgtagtttttttttcgctttactccgaagacagacctaagggtgcttgaacaattgaaataaagagcatttataaagaaaagaagaaaggaagggtttatttgatgttaagaaggtataacaagttacatacaaactctacaaagaagagagaaaagagtcgggataaacaatgttgagaggagaaggcattactgtatatggaactattgaataacgccttttccatattctacgttggcgttcggatggttggaagttttgccaaaaggctttactagcaagattattgttcgaacgccgttccctaaactcaagtacaaagtcacgtaaactgtcatgtcgatggcttcgttgccatcggaaaaacttaaaagcaaatatacaagtattatcataataggcttcgagttcgtcatcggagatggcggtcctgctagaagaaagctttgcagggtctcgaaatgctaagtgcttcacatttcgagtaggcaaagtgttgttgcgtcgaatcacaagttttcgattcgagttaacctgcagccccccaaagaaagggaatttccgtgaaaagcatgcaataagagaaaagcattatagtcagctacactataaatttttacaataaaggctctcaaccataacggttttgaagcagcaaaatagcattgttttcgaacatacgaagcatccttaactattcttttcacgaacgtcacacctgtgcgctcgacctcggagtactactgtctttatcttgttggctcgaactggccggctgtgactttgatcttgaggcaagagatgctcggagagacctcagggtatcttcatatcctttcttcttccagtaaagcacttggaaagcctttacgacgggttgagctgcatctcgaagctgtgcaaatttggcctcatcattaagcataccttgtatatcagctttaagggtggtaaagtgttcacacccatttgaaagcagacaggccgaaaggctctccacagcagttttcgagcagcgagatgcaaagggagtaacgctatcttttagcccaatggaaaattcctcgaaccattttcccacagctgctaaagtattttcttccgatagcaagctgatgtcagcccctagacttcgcaacgcgattcgaacggtctcgcaacttttcagaagaagttggcggcaactttcgttctcgagctctaaagcagatatcttctcgctttgatttttgcaggcgagttcgagttctttattcttcttctccaagacctcaacttgctccttcatcttgtcttctgattcagcgcgttgtcgtgcgacgtcttgatactcgatgatttttcgctcgaatgctttttcacgagcgagtaatttcttcttttcctcagtaagcaacttcttttcctcggaaagctctttcttttcgccgcttaacttgcgcacgagatcggtggtaattttcttctcgtcggccattcgatcaagtttgcagcgaagataatcccgatccttttcgagtttagcgatgcgatcaagtgatttcttccgtcgcgtgcaaatagctcgaagagctttccgagcaacaccacgttgaagacgagcaaggctcgcagtctgcgcatcagaaaataggttttaagtcaaaaaaaaatataatataatataataaaaataaataaataataaaaaaaataaaaataaaaatacctgtgcagcagatacatcaagtgctgcccaagaggacataagatcattttcttccaaaaactccttttcaagatcaggagtaatcagaacattctcgagttcatcaccaatcgaactcagggggtggcgatactttaggtcattcaaacacaagtttgggccatgatggctactttccccgagttcattgaaattaggaagacccataagccaatgtccatcttttgcacatcgttcgctaaaaccaccaagaacgttttgtatcagctctggggaaggggttgcgatgaacggcggtgacggaggtggagttgggttcgaactacctgtagttcgaacacctccatcagcagcactcttccctgcttcggacttttcggccgcattgacgggcgtttttgccttttttgcaaccaagtctctatcagctcgaagagagtttgttgtctcaacagtatcacccacttgggtcgaacaatcttcatcgacaaccgtgttggctggggcaacaacatacagtgaagctacttcttttgccgaaagggcaaaactagcatcagcttgaattggggtgacatggatggcagaaagatcaatacggatatcatcttcatccaactcttcatcactgtcaataacaaactgcactcgtttagaactcggttcaggcggaggactgctggcagttttcttccttttcaaatcagctaaaacagtaggaggaggaactgttttgctatcatcagattcagacgagtcgctcgagttgtcgctcgaactgttactcgagtcgctatcatcactcgagtcgttctcttcttcatcagctccttcctcttcttcttcttcttcagcattttcttcaccaatttcttcgtcaacatcttccacttcaacatcatcatcatcatcagaagaagaaggcttcacagatttctttttctttagtttggggacaatttcaggataaacccggacagggatatcggagcctagagaggcaaagacccgattttgccttttcccgttttgaagtgtcaaaaatttcaaatgctcatccttggtataagggccaagaaatttccgaactgggcggaccatatcctctggaatcacaactacaaggaagaagataacaaagggagaaaataaatcttcttaactaaatcactttttcaagaaaaacaaggttcgcaaaaaaaaatcaagttcgaaaaggaaacttacgatcagacgaaaccacaaatggaggaagactggaagggcaatcttctgggatttctccaagagtgatatcccagccgctcgaaagaggtctaattttgagaagaacaaactcttccaccaggtctcggcagctaaagttcgaaacaagttcttcgattcgaggttgtatggcagtgaactccggcgacaaagagactgatggctcggagacagcttttggtttcttcccagagaacgaaaaaggacaatccttatcattcagcaggctaacagggatttgatgataaaaccacttcgactgccacttgttcccccattttgctcgaatagcagacatagctggccatggacttccgcgcttcggatgaggagcaaagtttacacacccaaacttcgagttctgtttggtgtagtgccgagtacaatggaagtatgcaaagtcttcagcttggggggtctcaccgcagcttcgaaccatccattcgaaaagcccaattcgaactaaagcattcggagtcaattgaggaaactcaagtttgaacaatttcaggacctcgaccaaaaaagtgctgcacgggaatttaaacccggcgtagaagaaatcctcaaacacaagagtgtatcccagcttgggagaaggccttgattctcccactggtcaaattacaacgtttcgaccagatatccaaccaacatcaacaagatcgtttaagtttttgtccttaatcgaagaggcaccaataccacaagaagtattttcgtggttttttgatttcttggacttcgacttttccgcagttttcttgtttttccccatgttgtgtagtgagaaaggaagaaatcaagcaaagcaccaaaactcgaatggaagaaggaagaaagagatttagttcgagtcttttgtgatttcgagttgatggcagaaaaaacgagtggtggcgtaggtcgcgtgatagcgacccctcctggccttatatagcgcagggtggtaagggtcgcgggtttacgagcggacacgaaacccgaagcgacgcgaccccttaagcgcaccaatgaaataccggcacgtggcataaaaaacatttaaaaaataataaataaataaataaaaatgaaaaataataagaataaaaataaaaataatgaatagtaaacgtggcatatatgcatatttgaatagtgtgtttcgaccgaataggaggacggcggttttccccctttttccataaactcaagcacggtttcggccgaaaacacacatcgcccttacccgtgaggggcttgttgtagcagggtacaaacaccttttcctccaatttggtcaaaacactacgaggttttgcaagacctaagtatccagaggggaaaacactcattttgagtggaaactacctttccaagaggaagaacacctttcccaaaaggaaaataccttcccagaggaagaacactcattcgaatagaaaatacctcttcgggtgaagaacaccttttttagggacattccataatcgctaatgcaactacacatattttggacaagttacaatttcacaggtggtttccaaggatgaaagagaaggcaaaggggaattcgaattcccaggaggaagaagacggtccaggacggaaaatgcatttttcccaagagttcgaggaagagcactcctcgaacaagagaagatgccaagggaagattccgtggggtccaccttcaaccactctcgccagctagcacctaaaagactaaaagacccctggagatgtactagaatgcccccacagacgctgatgtggcaggggcattagagtaaacttacaaagacccacaggggtaaaaatgtaatctcacgtgtacgaccaccggttataaaagccagtcaaaaacctgtagcaggacaagacatctttaatacaaaagtaatcctcaaaagttgtgtttgctgttcgagctcgtttctaaggataggcgggaaaacacttctttccggcctatccccgatcttgttcgtgacctaaggtcacaacatcggtcattagcgtaggccaaaaatcttgatgaaaataatgccctgagatgctgagaaaaaaaaattgaagttggttgttgcagatgtaatttcctaagaatcgtatacatgttcatcaggtattttagttgatgcattgacacatggaacatctattactcccaagatatgcatatacggcctgaaaagtagtagagcaaaagattagtttaggattagattctcctatatatatggtttttctcttcaagaagttgggtattctccagggatcaagacaaatgttatatatttctcaataactactaacaagaacaataggatggcttcacagtgattagtggtaatcatctgtattacaagcaaaatttagagcctccagtgatctgaaaacatcacattacctccaaacaaagaaataataataatagaaccagacaaaattttcctttgtaaagttcagaagaaagaatggatgcaaatccattgataggggctgcacaggatcaactaagaatatggatagacgccttccaaagctgccatccttaaggctagcctattaatcgactttggctacctaattcctggaagagcttctcctgatccaagacatatatgatcacgcaaggaggagacaatatgttaaaatcttcaaactctatggccaatttctgattggcaattgtgaatgatcaagaaaacaaatggtgatccacaaattgacacatcacaaaaacatgtaaaataggagaaattggtattaccttagggtttagggggaatagggctggttggccggtggttgatgtctgacggtttcaggagcagagaacagggagggggcagcagatggagcagatgccggatcggctgggcttccctggtggcggcaacctcgacggcggaaccaaccggatcgtctcggactcagcaacaagcatgaggaactggcggcgcggtggagatggctgtaggagcggtggatggcaagatacaggcgaaacagtgatgggggcgcgatcggcagggcggtggtcgcagcggatgggtggagaaatcggtggcggcgggggaagggacgacctcgggggcagcggtggactgcagcggcgatggcggatggggaagatctcgtctccggctgtgcggcttcgttggcctgtcacgaggagggaggatgcgcgcgaatcgagtaggagcgaggagggcggcggggattcgcggggaggagtcagcgcggcggggatttatgcgaccgagtcatcgcgaggcagaggaatcggtggaatcgctcataaatggcgtagaggatagtggacggatgagattagatcagatggtggatagacggatgagattagaggggatgatttcacctgtaggattggaggggtacaactcctcctttttatattagtatagaagtatagattcttttcaaattcaagacttgaaggggaaactacacagttcaagggaaaactatacattatttggtgaaaagcaaggagaaatgcaatgctgaaatacatgagttatgcattgcagtaataagctaataatacataggtactccctccgtttcaggttataagactttctagtattgtccacattcatatagatgttagtgtctagattcattaacatatatatatgaatgtgagcaatgctagaaagtcttataatatgaaacggaggaagtaataagttaagtatacgtttttgaaaaactgaactgtttcaccaaatgattcaatacagatcaaccaagctgtattcagtcccagtactccaaatagggatatgtaagaggaaggaaatcagtttaaaagatgggaaggatttatctatacctggttgtgtagtcgcaatcatcaatgtgctagacatctaggccattgaaccaggctcctaatgatgggtaagaattagataaaaaacaaatttatgatgtagataaacagaaaccgtgtctgaagaaattgcttactggttgattgatatgtaagaaaccagatccttggagattgcatagaactgaacggttgcatgcctaaagtatttgttccccccattcaccaaattgccaatactcaggctcaggatagtatcttacaccccgagaatgaaaaacgatctagcatttggtcagcagtttaaaatatcagccaaggcatgacaaaaacaggggaacttacttctgagccaggactggaccagatttcatgcagccaatgtaagctcgaggtttcgaccaatgcttagcatgtttccaagagttgctgcaatatttgcaatattattagtacagtgtcgctaaagttgaggtaaaattttacagcctaagttttcagctttagcttcagaagcaacatctctgaagactatgtatatatgagatttcatgaacttagaatgtatagtttgcatcaaatacttagaagaaatttaatacaaatgaaatgtctgaataggtcaaatttaagcaggaaagaattaagacttaaagaaggaagatgatgttagatcatagggcagtagttcgtacacctatatttacatgtagatcaacatccactttaatgtagcactctgcagccaacctggacaaggatttcacaaaaaatgattgtctttgcaaccaactccagatattctttcaacatgatcctgagcaatcgacagatattccaagatatttcgctgttacagacaaataacagaccattaatactgtactctaccagttaaagtaagttctattgtactacagcctatggtaattaccaatctaaagaatccaccatgtttcctattttctgcatctatagctctatcgagtatcccaccagatgttgaactgtcaaataagataaaagatgaaaatttcagatacattgagcacaagatttttttacttgaaagtaaacccaagttattgtcagtttatattgctgaataataatactacctccgtttcatattataagactttctagcattgctcatattcatatatatgttaatgcatctagacatatatgtgtgcctagattcattaacatctatatgaatatgagcaatgctaggaagtcttataacctgaaatggaggaagtagtaaattggaaactgtttagtctagtaagactgtaagagaaactctccctttactatcgtccacaatagattgcccaaagtacgtgttttctattttcctctacaaaactatgaccgataagaaatgtaattattttttcttcctcaaatcctcttctcccacctgttgtaaacacagaaacaatgtcatgtaacatgaccttttttttctgtggcaacaaagatgtgcatgcaagacaatgcaaaccgtgaggaagcagcggcaataacgattcccttgaggccggctcctagcatctcctccctcgggagcttgcaactacagcggcttgagctcgctctatagctgctggggatgaagggcagagaaaaagaggcaacatcatagacgagatggcccaggtgagcgaggaaaagtggttgcttagacacctcatataatcatgtatacaagcacatatttgaggatatctaattaattaatgcattttacattttagacttatttgtatctttagttgggatccgttgcaacgcatcaaaacagggtgccagtgtccaaaaacacagtgaattcaaccatatgtaagcatgcataattccagatcacttgagtgaagtcttcaaagcaaacgatatggaatatcagaacagaacagctgagaacataataaacttactaaatatctaaaggaactgcgtagatggaaacatagctaattagatgtcgtatattgtcagagggtcagtttttccaatttaacatttgtattcaccatcgctatggtacaacattactgattgagctacacaagctattgccaaatctcaaagatgtaaactatgacaatccatgactcgatgagtgtttatgcaacttcatttgtctagaatgaaactcagcatttaaaattaaggcgaggggtacaaattgtgcctcaaagtgggctaacatagcttttggttgtgagcaagactacattaattactgttaaaaaagttttgtacagaacattttgaaaccaaattaactttacgacttttcttaaattggctgttaaactgggttgcatgaaaaatgaaaataaaggatgcagcgtggaactatcttagaaagtgtgctctagtagaggaaaaattaatccgagtcaccctaaactttcatcccattactctaacacctgaaggtcctctgcctgcaaaacacttcaaagttttcttcttcctttgtctctggggactctggaaccatcgacatgatgtagtttttaggggtgcatcaccttcaattgattgtcttatcgcaaaatgtaaagaggatgcaaccttgtgggctgaaagattgagccacgctgacagggctgttgtagagtcttggaaacttatcttatcatcccccctcactctaatgtaacttaagctactgtactgttcctcccttttaatgaaaattcaggtggggaagctctccccccccccccccccggtgaccagtctaaaaaaaacacctaaaggtcctgaactatagaacatctaaataatatgtggaacttaaaaagccacaaacagtaaccattaccctttatgtaaggaggcatttaacctaatcccttaagattggtaattaattaattttccaggacaacagtccaaagagcttgggccatatccacactatgcaagcaagcacaaattgctttcattcggtaattttgcatttcattcttcaccttggatagctaagtggcagtgagcaaattaaatttaaggaaaaaggaacctcatgtcagactacttccgccttaatctgaagaacaacgatataacactccaaagagtgatgtaacacagaacatcacacaaagattggactcgctcgaacaacttattgtacataaaatgcaattcccaaatcttgtttgcatctcaaaatatatactcatatagtgcatcaattcagcaggttatttccttcaaatttacttttgatgaataaaaatacttgtactagccttcgtaggaggacagcaaatttgctagcgaaccagagaggcaggtacccagcatttgcccttaatcaccccctgaacgcggcagctcagacgcaaaaaccgaaaaaacaaacccaacatcggcaataggaatcgtgcaattccaccccgaaatacgcaaaaccctcgcggatcagggcaaggcgctcagctagagaggggaggggtgtcgctcaccgcagatcttgacgggggcgtggatgcgcaggaggttgtgcacttgggctgcgataggagcacccgcttgacctcgacgtagagctgccggatctccgcctcggacaggacagctgcacctgcctcccgccccgccgtggcagtgcaggctagggctctgtcaacaccctcctccatgaacaccctccgccaaaccatcgagctcgccgcctcagatcagggaatgaccgaattaaatttgaaaatacactgatcattcaattttttcttagaaatattcgtgatttaaaagtttttgtgaaaatataccgtcgatatcggtatcgcgcggtgaaagcgcggtctcgcagaatgaaagagggagagcgaacgctctcgcgaaaccaaacagcgacaccgtgcaatatctccacttgatttgtaattaattactcaaataaaaattaactaataataattagtaattaattatcctgattagcaattaattataatcactaattaaatcatcacggcagcggtatcgctctttgctctagcgagactgaatggtgtcgccctttcattccgcgataccgcgcggtctcgcaccgttgctacgtgagaccgcgcggtctcgcacttttatcacgtgataccgtccgtgacgtcatgtccacatcatttttgcacaaaggttatgcgatatcgacggtatatttccacaaaaacttttgaatcacgaatatttctgagaaaaaattaaatgaacagtatattttcaaatttaattggggaatgacattgagttgaggttgtggctactccctccgctggaccggcaagttgacgacgaggcaccgctctgctacgcatcatggagacgagacggcgtggcgctcggctcgagtcagggaatcgtttctacgccacctgccttctcccatcggaatatataaaggggcgcgggttgggcgggcgaggaggtgtgccacgtcagaattttgctatagtatgcacggtgcgcggggtggtattttttgtgaaaaaaacccttcgatttccgggtaatatataagggcctgttcggttagcccggggttggccgggaatgtggcccaacccacgggggtcatcccggtgtgaaaataatcccggcccaggcaaaaaattgcgttcggttaagccctgtcgctgattttaatccggcccatcacggggttccctattgtccaggcccgggaaaaaatcatctactgtggaggcgtggaaaaatacatctcgcatggaggagacgagaaggcagcggcggcgacgcaagcgcgagtgcgagtgtcaaccgcgtgacggcgcgacggcaacactgcgctctccccggcggcggcgctctcccctccgctggccaccttcccaccggtgagtatctcttcattcccctctcttctccctgtactacctagggtttggaactttggatcttggttcttgaagcctagggttcttggttctcaccggaccgtctcctacctaggattctgtcgccgcctccgtcgccgtcctcgccgtcttggaggtcgccgtcatatccgccgtcccctcgaactccgcggctgatgcctgttcttttttgttttttcgcaaaattccttttcatctttcgctgcttaattctgcttgttatgcgtatgaatcaggaatccacagattctctttaatgtcaactagtatagttggttccaatcttcaagaatcaccatttctacttgtatgtttctcagcatgctgatgttgttattagggaggtgattctgtgacggctcagtagaactctattgtgcatatgttcttctattttgatgaatcaccaatgattattttgtgtgccataaaactctattgacaaatcaccaataatacttccaatgcttttttctttggtaaaaaccacaaatgaaggtcccttggactaattaccatattacttcaatttataatataaatggaatatgcattatttgttttattatagtactttccttggttatttttctatagttcatcttcaggaatgctagatctattgttgctgcgtatggggtgaaataaaggaaatgcaatgcattgctgactttgtggggaatgggaggaagtcctgatgttttttttattaagataatatatgcaaaatgtgtgcactgatattatgttagacccttgcatttgatttctctagactcctacagaacttatattattgctagtgtcagaatttgaaaagccacgcaatataaaaaatgcacataaaaatttctttgtacatgtacaggtaatctaggagccaaccatatgctcatatagaccgtgtttagttccactcaaacttcctctcaactcccaactttccataacatcacatcacatccaaaactttcctacacacataaactcctaactttttttccaaactaccaactttccccaaacttctccccaatttcaggaactaaacacagccctaattgacctgctagtaatttgctttaaaattggtacaactatatgaactggaaactttagtagtactatatactgctctaactattactggtttttagacctatatatgtgcacgctccatatccatatgtactctcattgtttcttgatatactagttaggaggacgattacaggcacatatgattctttcccccaattcagaagtacttgatattgtcctattcatatgcatgctcttgtattagaactttaggagcaggaaaagaaaaggcaagtcactgttttatttttgttagccatccaacttacagtcagcaaatatttcctatgtcatttttttgtcttaatgttattctatttcctacatgtgaacttttcaatagtatagtattgatttgatatatgcatcaatgttcttggccatcagcaattaagcaagtatatttttttctgattttttatcatcaatcacacacacctgttatattttgctgaaagatagattcttggttgagatgtgcaagcagcaagcaacaacctacagagggccgtccattattttaaatttcatttttggtagttaaaggccgtgtttagtttcaaagtttttcttcaaacttcaaacttttctatcacatcaaaacttttctacacacacaaactttcaacttttccgtcacatcgttccaatttcaaccaaatttctaattttggcgtgaactaaacacagccaaaattatgaaaaatgcacataaaaatttctcttttctacatcatagattgagatcacaaccaccaattcgaaacaattgctcattgcacagaagtgttccttaaattatgcagtttcagtcagaaactaaagggaacttttttctctgcaggctttgggaagaaggaagtctgcaaggatactgcttttttgcggcatcagcaaatgttgatccctgaacctttgaatatgtatattgttgatgcaacctttgaatagaacaaatgttcagacttgtttaatttatttaatttgtcaggtcgtctcctgctgctcgtcagctctccactcatcttggacttgtttaatttgtgatgtttccattttcattggttcatactttcagtcataactgtttttcagtttattgacaatggactaatatgtacaccctccgtcccaaaaaaaacccaatcttgtgtttgaacctatcaggattgggtttttttttcctagataggttcaaacccaggattgggtttttttggacggagggtgtccaggttcaaacccaggattggaattttctttggggcggagggagtattcggttattattgagcatcagcattcatatattcacgttggtcagcagtttttagatttttctagccaaaatcccagccaaaaccaaacacagggtttctagagagggattaggaaaagcaagggattcatccccaacagggattaagtgatatgagagggattcacttaattcctccctggattgattctccttggggattaaatccctagtaaccgaacatagcctgaaggggcgcaggttgggcgggcgaggaggtgtgtcacgtcaggattttgatacagtatgaacagtgcatggggtggtatttttgtgaaaaaaccctttgatttccgggtaattcgatcaaggtcccttgagaaccgtgcctatgaggtgtttattttcatggaggcccagatattccgtgcaaagaaaagaaaaatcgtgaattaggactgtgttgtaaaaattaaaagaagaggggctttttcgaaaaatgactcacactaacccacccaccccagccctagctttttttttacaaataatacgatttaatgaaaaatcgcaaaaatataggcaaaattttacgtttaggggtacctatcgaacaaattcaacaggtaccacagggtagttggtctaagaaaaaaaaatagtactttgctacagtgcccccacatggacatatcgaatagtccagatttattaaacgggcaaagtttgataggctgcgctgttacagtgtcactacagtgtttttcttttttttttaagatattttatcactcgtcgaactggcagttcaacaagtacctatcgataggcgaacaacggctgttctataggtgctagacttgcgatttcatttaaccgaccaatatttttgctccattaaaatcgtattatttgtaaaaaaaattcctgtcattctcccctcctccccttcgtctcaccctctccctccgccgtcgccatcgtgccaccgccgcctcctccacctcctccgccaccgccgtcgcatcgccgtctcggaggtcggagctcgtccgcctccgcctcgcgccgtcgccgagcgcagccgtctccgccgagcaacggtgaaggcgggcgcagccttcatcagcgacgaggtcgtagctccgacgaccacgccacaggcggcgcaaagagctgacggcccagatcctggcatcgggagccacgccgctgcgcccgccgatggcgacggcgaggaggaggaggaggccccgtcgccgcgtccgtcctccgccggctgctacaccttcctccgctccgcgtctcgccgcggcgggcactggcgcctcgactcctccgcctccgcgtccgcggcggcgcatgtggtcagggtggaggtggggacgacgaagggagagaggaacttgttcccccgtcgacctggccgtgctcgaggccgggccggtgcggcgcctcctcgcggcggccgggcggcggacccgcggtggcgttcgccgtggacgcgttgctgttcgagcacctgtggtggctgcagccgacgccgacttcgtccctcccctcaccatcgtgggtcatcgattcccctaacagccgacccctcgcgccgcccgactccgtcgacgtcatccctccccttgccatcgtcggccgacgcgccgccaccgcgccgccgccgccctcccacgcagcagatccatgccgcaagacgtccatcggccacaaccgtcgctgccctcccctgcagcagatccacgccaccggccgccgccctcgatcacaacgtgatttggaggtggagaagcttggtgtgttacgagttcattctcaaatccgctaccctcgatgacagcccaggctgcggcttcttcgccaacaccagggtcaaccttgccaacgatatgtgagttagcttcttcctctctacggagatttctggtgatttttgtttaggcggaacagcgactacacgctgatgcggttgctggcacaggcggacgccatcaacttcatcttcttcaccaagatggacattggtgggttgttgtgctgccttcaattatgcagggttgggttggactctatgagggtttcgagggcgtgtgcatttgttgaccatggctgcgggtggtcctcacaccaacagcggccggtgactccatgaagtatcttgtctggatggacggtgagtgaatggctttcttttttaactttgtgactggccctaattgccacctatttctatacattcacctgttcatccagcgattccagaatgtggcagtggcagtgcggcttgccttgatttggtttgttgtgctccacgattatcagttcagaatgtcagataagtgaaggttggttggttaggtagcaggaagttccctgatcaatctgttatttgtcaaaatgtgacaagcatacttatctctttgttttgtaatgtggtgctatctagctgggatgtcggtagcggtcgttgaagtggctgcggcgacgattgcttcttccttggatgggagccaccgttcgccgaccttgctgccgccgacgcccgcatatccttccatgtctgtgtgccagaggtaaacggcagtttctttctgttcttccaccgtttgtgctgatgaatgttgtgcattccctccttgtttgagctcggccatggaggagtcaccggtatctctgggctggcggtgctagaacagtacacacggtcgtgttgccggtggagctggacggccttttcagggtgggttcctgcaggacagggcaaagacgatggttttgttgaggaatttctgtgacgttatgagccattatgttgatctgcttctgttttccttccaggatttgtgggatgcaagcagcagcagaaacagcgaccgagcacgtccgattccagctacgttcagcgtcatgtatgggaaggtggggatcagtgccgacacacacccccagttctacctccgattatttcttcagcgatagtcttaattaatagctcttgtgggcagtcattgacaggcatggtgtgtacttaactgcttattgaaatggtcaggtttactttccattcgtaccggttcatgcattgttctgctccaaatattttcctttattcgaggggattggcggatgttcgcacaggcatggggcgatccggtttcatctattttgttgccaggtactcgttgtagcgttagctaccgctactgctcgtgcctgctggcagtggccctgtttagatgggactaaaacttctaagtccctatcacatcggatgtttgaaaattaattataaatattaaacgtagactattaataaaacccatccataatcttggactaatttgcgagacgaatctaatgagcctaattaatccatgattagcctatgtgatgctacagtaaacattctctaattatagattaattaggcttaaaaaatttgtctcgtgaattagcttttatttatgtaattagttttgtaagtagtctatatttaatactctaaattagtgtctaaagacagggactaaagttaagtccctggatctaaacaccacctaagggtggtgcactactttgctatatagagagcggcaattactataaataatgctattcgttcatttatggataactattgagacaaaatcattgagtagcaagcaaaagtgcttaccgaaatataagacgaaaagaaaccgcgaaatggaacatcaaaaaatacatagaagacgattaatctatgcaaaattcatcctcgggctcaaagctgttaatctcaacatcatcgatagttaatagcccacaataaatctagaacaaaagtcagaaacattttaattttgaactaaaaatttatatccgatgaagacatcttaattttccatccatcttaaagtgtcacagtgtgcttacaattttactaatgatggtctgatggactaatggatgaaggacaacaggagtcccttcaagcagagatgtttaatggaaacttcctttcagttcttcaaactttgaaccctagcttatataaatctggataattgaaaaagtagaatcaagttacaaatcaaactaattggattaaaaagaagagtgaactagaagagaagagaggagtataaattgaaaatctgaaactaatcaagagaattagagagagataattagatcattagatgaatacctctcttcagtttgcctgtgcactgctcggttgccctactgttctgcgccctttgcctctgtagtcctagtccaggcgttcagctggcagctactgctgctttactaccggcggccggctagggcgaccagcggcaggacggcgactcgacgagcccgcgggccagcgatgcagactgcagcctgctggtgcgacggatgacgaagacgaacagacgacgcggtatcggtggactcgcggtgggggaaaagaaaaaaaaaaaaaaggagacgaggcgcggctgtgatactcgaggcgtcggcgcatcgctcctgggcgtggggggcgtctcctggcgttgcaaatgggccgttgcttgctcgctcatgggtcagggtggtgcacactcttgggctgagggggttcctatgaggtgaaaaggaaaaagtgcaccgaaggtccctcaacttgtcatcgacttacaaaatcgtcctccaaccgcaaaaccagatatccgacgtcccttaactaatcaaaaccggtcacaatagatctttcggtagttttgataccggttttgtcttatgtggcggcggagtcagcgtgggctgaccccacctgtcagcatgccacgtgagcaccctctcttttcccctcttctccctccctcctcctcccctctctctctctcactcttgttttggccagcccgtcggcggctgggaggaggccgcggggacgaggtggcggcggccggtcgcgaatggcagcggcgactctgcgtcaccgccggcggcgaagtggtcccgcgcgggcggccgccgcggcgttgggcacggaggccgacgaggacgtgacgcggcgacgacgctggtcctccccatcctcatccaccgcgccgcgcacggacggcacgcctgctctcgcgccgccggccagcggagagcgcgtgcgaagagggaggaggtggggaggtcgacagcgagcacgcggagagagggaggatgcggcgcgggagccgcggcgcccgcccgcgcggggccgcttcgccggcggcggcgacgcagccaacgccattcgcaaccggacgccgccgcctcgactcgacgtccttcttcggatcttgctcgcccgccgcgccttcatcctccgcgaccagctcgtcgctgccctcgtcaggagctcgcctatgaagttctcgtggagctcgccgggccagacggggtgtggcctgagcttgcagcacatctcccatcagatatacttacacgcttgtggggacgctgacgacgccgaagcggtacgagcgtcgcaacatcgtgcatctcgatagcgtacgcgctgcagccggcgatgcccgcgcatgtggacgtccgcttcgtgttctgctccgtgacggatgtttgacgatattttgtcattttacgttaagcaaacaagattactatttataaaagaagctagctcgctggtttttatgagatgcatgggccatgcaaactctcgctggcggcggcgctggacgcaatggtgggacgaggtgggggaggtggctggggctcgtgacggctgtgtgggtgcagtgcatctacggcaagaactacaccatcttcaactaatcccactccatcaagacgctcatgggcctcacccaacagctgctcaaaacagcctctccgtcgccaaggaagcgtcgggccgtcgctgaggccggccagctctgcgccctccccgacaccgtcgcccagttcttccgccaccgccgccttccagtttcttccccgttggccgccggccgcgccaagctcctcccccgccgccgccgtcagttcttccccgtaagccgccggccacgccaagcgtcgtcgccgcgtcacgtcctcgtcagcctccgcgcccaacggccgtggcacccgcccgcgcgggaccgcttctccgccggcggtgacgcagcgtcaccgacgccattcgcgaccggcctccgcctcgccccgacggcctcctccccagccgccgacgggcttgccaaaagaagagtgagagagagataggaggaagggtgaagatatagttggccatgtgggccgcccggcacggcacggcccaggcccggccgtgcctgggccgaggcttgtcgggccggcacggcccgaccgacgcaccgggccgtgccgtgccagcccacgtgccgcgctcacggcccaggcacggcccaacacgcctcgggccgtgccgggccggcccgaaggcacgatgggccgtcgtgcttttcctcagaataagtctaaatttcctccctcctattgggctgtgacatatgtacagctacaaaaagtctattttacctccctcttctttgggctggggtatataaatagctaaaataagtctatttaaggtccctattctttagacagttacatttatatgtctatttttagtccctatactttatgtaccgggcctggcctgccggcccatcgtgccgggccggcccgaccgtgccgggccagcccagcgtgccggtggggaggcccaggcacggcccgacggtcgggccgggccagcacgggcccgacccaagtcgggccgtgccgtgcttgggccgggccaaaaaggcgtgccgtgggccgggccttcgggcctcgggccttatggccaactataggtgaagaggggaaaagaaagggtgctcacgtggctatagatggccaaaaggcccgaggcccgatggcccggcccatggcacggcgttttggcccggcccaagcacggcaccgcccgtcaggggttgggcacggccgggccggcacggcacgatgggcctcaggctaggcccgacacataaacaacagggagtaaaaatagacatattatatgccatggtcgaaagaatagggacgtaaaataggcttattttagctatatatatgtcaacccaaagaggagggacagaaaatagacttattttcactatatatatgccacagcccaaagaagagggacggaaaatagacttattttcgctatatatatttcacggcccaaagaggagggatggaatatagacttatataaaaaggcacgatggaccacccgcgccttcgggccggcccggcacggcccgacggctggtgggccgtgcctgggcgggaggcgtagcccatgggccggcacggcccggcacgaagtgccaatcaggccgtgccggcccgatgtctggtgggccgtgcctgggccgggccgtgccgggcgggccaaaaggccatctatacacgtggcatgctgacaggtggggcccacatgggtcccacgctgactcagctgtcacgtaggacaaaaccggtatcaaaaccaccgaatgatctattgtgaccagttttgattagttaagggacgtcggatatctgattttgcggttggaggacgattttgtaactcgatgacaagttaagggactttgagtgtactttttccaggtgaaaatgaggggtaactactaaaaggaataagtttataggaggtccctcaacttaacagcgagattttttaagatcctttaaccacaaaatcagaaatgtgtatccttaaacttacacaaaccgtacacataagttcctatggcagtatatatgggtgtttttgctgacttggcatcctagtcagcaaaataaattaaaaaagtacatggggcccacttgtcagctacacatattttttcttctcctcctctttttctctcttctttctttccttcttccgttcttcgggccggcggcgggccggatccgcgagcgcggcagtgggtgttagctgctaatcacccgatcgaacactttgtgcgcacactgcacacgtccggcacggcaacagacaaaaaaaaactgaagaacacaggaagaaattcagaacagagaagcagagtatttcagagtttcagagaatcacgagagagaaggaatttgtgggacaattttctgggttctttcattcaactgaattgaaaaacttacaaatggaaattttagctacggctacttatactctaataacagaaaaaacgaatccaagcctacaatcgcgccatcccacgatccggaactcctggatccaatgtcgtgcaaaactcacgcccacaacgcacgcctgacgcggtcgtctactcctgcagctcgccacatctctcgtgcatgcataacaaactcaaaactgaattattcatccagccgttgcaactgccatcgcctggatcaccttggggccatagctgaaataacagtcaacaaactcccccttaattctgctacggcccaaaatcacgaacacctagcaggtgtcgtgctgtcgccaatctcgctgctggcaacccttttgttaacgcatccgcccgctgctcctcagtccggacgaattcaatctgaatcttcccactttcaacacactcacgaataaaatgataccgggtatcgatgtgcttacttctcccatgaaacacagggttcttcatgagtgcaattgctgatttgttatcaacatacagcttcaccggcctggcttctgcaccaatcatctcaatcaacaatcccctcagccacaaagcgtgacacgctgctgcagtggctgccatgaactcagcctcacaggacgaaagtgccactgttttctgcttttgtgaactccatgagaccaaactgccgttgaagtaaaacgccatgccgctagtactccgacgatcatcactgtcgccggccagatcacaatctgtgaaaccagtaatctccactgcaccattgcctccagaaaacatgagtccacagttgattgtccccttgagatatctgagaatttgcttcaccgccttgaaatgcatcactgtcggtcgttccatgaatctgctcaccacgcctactgtgtaggacaaatccggccgagtatgcaacaagtaacgaagacaacctatcactcgcctgtactccgtgggatcaactgtgcttccttgagcatctttgtgcaactgtgaacgatgttcaataggaattgaggtagaattgcaatctagcatcctaaactgggtcagaatcttccttgcataagcaacctgcttgatggcgatcccgtcagtgccttgcaacacttcaattcccaagtaataggtgagcagtccaagatcactcatctcaaactcccccatcatctgttgtttgaatgcagtgatctcgcttgggctttctcctgtcacgatcagatcatcaacatatactccaacaattatcccggcactccctgtacctctagtgtagactgcttgttcttgtgcacaccggctgaaaccaagctccttcatgctccgatcaagctgtgtattccacgcccatggcgcctgtctcagcccgtagagagctttgctcagtttgtacacaagatgttcctttcccttctcaacaaaaccttctggctgagagacatatacttcttcctcaagatcaccattaaggaatgccgacttgacgtcaaggtgatgcacctgccaccttcgatcagctgcaactgcaagtatagctcgcaccatgtccaaccttgcaaccggcgcaaacacttcatcaaaatccacaccttgccgctggaagtaccccttcgccaccagccgcgccttgtgtttgatcacttcaccggcagtgtttttctttagcttgaacacccacttgagccctattgccttgtgaccggctggcagcatgcacagcgaccacgtcttgttcttctcaatagcctccagttccttgttcattgcgttcacccacgccggctcgccggctgcttcacgataggatgtcggctcctccatctctgcgagcagcgcttctgtgtcatcatcatcctccaccaggtccacccgaggtgcttcaatcatgatctccgccaagcttctgtaccacaccggcccgtcgtcactgtcggccgtgcgcggtgacgcctgcacctcggcagagtgcgttgaggatgagccgagtgtaggcgtgctaggcaaggttggtgagaacctcgccgggcttgccggaggtgttccccgctgttctgccacttctggctccttgccggctcgccttcctgccggcggcgcccggtaccacggtaccgagcctgcctgctctgccggcgccggctgctctgcgccgacgggttcttctacctcgaactcagtggaagtcacctctcctgcagcaacactccactgccaaggtgtgttttcatcaaaaacaacgtcacgacttacaatgatttgccgacgacgcggatcaaacagccgatgggccttgctcccttcttcaacgcccaggtacacgaccggattgctccggtcgtccagcttcttcaagtgcggtgcagtcaccttcgcgtgcgccgtacacccgaacacccgcaggggcccaggtgaggtttcttccccgtccatgcctcgaacggagtgcgatttcccatcgccttggtcggcagccgatttaggaggaatacggcgtgacgaactgcctcgccccacatcctgccgggcacggacatccccttgaggagagaccgcgccattgccatcaccatcctattgcgacgctccacgacgccattctgctgcggtgaatacggtgccgtcaggtggcgctcgatgccggctgcatcgcagacgcgcgcgaactcgccggacaagaactcgccgccgcggtctgtccggagtgtcttgatcgttcgtcctgccgtgttctccgccaacggcttgaacttctcgaaggccgcgagcgcttggtccttcgacttgatcacaaacacccacatccaacgagaaaaatcatcaacgataaacataaagtatcgattaccggcgaacgtcgatggagtgatcggcccacacagatccatgtggagcagctcgagcggcgcctctgctcgatagtttgccattcctgggaacggctgccggacttgtttcgccaccagacatgcttgacacagctggtttgggtggtggactgcgggcactcctgccgccatctccttgtccaccaatagcttcaatgcatggaaattcacgtgtccgagtcaggcatgccacagccacgccgggtcatcgagactagccaacaggcacaccggtgacgccagctgtagctcgatgcggtacagccgatttgaggatcgccgcaccttcatcaccaatcgccaaggatttttgtcgaacacctcgaggtcatctccatccatcacgacacggtggccagtttcagttagctgccccaaactcaccatgttgcagcggaggctggggatgtagtagacatcgtcaagcaaccactggtcaccgttcttgcatgagaaaaggatggatcccttccccattatctgcactgacgaggcgtcgccgaacctgacctgccccgtcacggtcttgtccagttcccggaatttccgacgatctcctgacatatgattgctggcaccattgtccaggtaccacagatcaccagcagctgctcccttctctgccagcatcaggcgaggccacacacgctcctcgtgcacgaccagcccgcagagcgcatcctggcgcggcgcgttctgcaccgcctctgtcacagcgagcaacaaagctgggccagcatcctccgtttgcgcaagatgagcttcaaccttcttcttcttgggatgtggacactgcgtggagtagtggccaaactcctcacagttgaaacattttatgtggctcttgtcgcggccaccgccgccaccaccagagccgccaccgctgctctgcgtcccgccgcgtccgcgacccctgccacgaccacgcccggcctggccgcggttcgccccctcaccagagggcttgttcttctatggtgacgaggtttctcccccgcctttcttgaagcgcgcctcccactcggcctgagtgaggagaacttgcctgtccgcggtcactccgccggtggtcgccttcttcttccgcatccgctcttcatacgccttgaggcgacctaccacttcttcgaacggcatggtgtcgacgtcgtaaaattgctcgatccctgcgacgaggctgatgaacttctccgggacagtgtcgaacagcttcttcaccatggcggcgtcattcaacgtcgcgccgagagcagagtaccggacccccatcgtggtgatccggccggcgtactggtccagcgtctccccggcctccatcaccatgttggtgaactctcccttgagtgtctgcaggcgcgcatcgcgcacccgatccgccccgacgaatctcgtcttgaggcaatcccaaacctcctttgccgagcatttctttgcaacctgcatcaagagatcctccggcagcgactggagaagatgagactttgccttcttgtccttcctcgggtcgacggccgccccggccgccggctcgattgcttcccatacgccttgatcctccatcatagcctgcacacgtattacccaactagtgtagttggttgacgtgagctgtgggtaaaggaaagcacttcctgagctcccccctcgccgggtctgccgtcgccggaaccaacgccatagtgccagatccgccctcaacctgagaagctctgataccacttgttagctgctaatcacccaatcgaacactttgtgcgcacactgcacacgtccggcacggcaacagacaaaaaaaaactgaagaacacaggaagaaattcagaacagagaagcagagtatttcagagtttcagagaatcacgagagagaaggaatttgtgggacaattttctgggttctttcattcaactgaattgataaacttacaaatggaaattttagctactgctacttatactctaataaaagaaaaaacgaatccaagcctacaatcgcgccatcccacgatccggaactcctggatacaatgccgtgcaaaactcacgcccacaacgcacgcctgacgcggtcgtctactcctgcagctcgccacatctctcgtgcatgcataacaaactcaaaactgaattattcatccagccgttgcaactgccatcacctggatcaccttggggccatagctgaaataacaatcaacagtgggcgagcgcggcagcagagcggcggcgggctgcggacggcgcgccaacctcctccgaccacctccgaacgcatcggcgcgcgcggtgacgaaatcccccaaactggcaaggcagccattcctcgtggtcgcgaccgaggggcccaatcgcggcgaggggaatgggttggtggccggaatcgagctaggtacccgctgctaccgaggtggtgctcgtgcgcctcgcctccgccgtgcggaggtaccctctgggctgcgggagagctgccgccgcgtccaaacctagtaaagcgcaatcagcatcgcgcaacggcgaggcggagtcaatcggtggtgattagaaggtggaggtgaatgctggctcagtggctccaatgcatggttggatgaattgcagaggagatgcaggtggtgcgcgggaggaagttggtgggcggccttgggacctgactgggctcacgttaccaccattcctgtcgtgggcgcagcatgggaggaggtcgcagcggcagaagttgctgtgaaacatgtgtgaagccttgtgcttacttttgctaaactgggtacatgagcttggtggatgatgatcagatcgacaatgaaagacttgtgcaaatttgatcattacagcggccggcgacgctggccttggccgtggcggggtcagccagccgacccaacccagctctattcgaagctatcggttaagtagtagttcgatgtcttcttgctaagcacggccgccgttcgacgcgggcaccatcctctctcctacaccgacatggtctggagcccgacgaacccatcggcgtacacacatgaagctccggggcatcgccatcaactaagaagcgcgcggtccacctccctcccgccgcagccagccgcgttggtgccgtcacgcgatgagcggcgagcggaggaaggggcagcaatggcggaggtccaccgttgcactcgcccgccatccgctccgcgccgcagcccgccgcacgctcgccagtcgtccgcagcctgccgccactctgctgccgcgctcgccgattccgcccaccaccggcccgaagaagggaagagagaagagagaaaagaggagaaggagaagaaaaaaaatatgtgtagctaacagatgggtcccacgtactttttttaattttttttgctgactaggataccatatcagtgaaaccacccatatatactgctataggaccttgtgtgcacagtttgtgtaagtttaagggtacacatttctggttttgtagttaagggaccttaaaaaatctcgctgttaagttgagggacctccggtgaacttattacctactaaaactgaaaattgggccgggtgcctatgaacccccctaggcccattgggctccgcccctgcctgctggtgtatgcatgtggtttatcgaattaaatttgaatatatattcttttttagtaatatgcatttatatacgttggagtcaaatatttgcgcaaatatactttccccgtggactggggaagcgggaacgagatggcaacgcagattggcagtgcgggaatgcggtcgcgcagaacgggtgtgcgggaccgactcggtcgcgtggaatggatgtgcgggaccgagtcggtcccgcggcgtggctgcgctgagtggtggtggtagcgggaccagtcagctggccaggcgatcgcgcggaccggaggtgtgggaccgagacggtcccgcagccccaatccgcggaaccgatagcgctcctgcgggcccgcctccccaattagtgccgctcgattgcgcagagtggaggcgcgggaccgagcggtcatgcagcgccagtctgcggcaccgtgatgccggtcccacacccttctcccgtaaactgaactccctcgttaacaattttaagtgcaactataaatttcaatgtctaacctagatggtttattttatttaattttcgttataagtagtatttttattattactagatgataaaacatgaatagtaaattatgtgtgattaataatttattttttaaaaaaataagacagacgatcaaaattaggtatggaaaacaatgcactgctactccgtgcctccattctgcgggatcgcaccgaaagtttttttgtccaccgaaagttatttgtcttctctatgtcacatgctcgccacaaacaaagagagagtgatgctagatttttttcgcgtgctgtccgccgaaagtttgttgtcgtctggttagagaggttacttgttgagtgcctataaaaggaacgttgcgaaacgaaagatgcggactcaagtatagcgtatcacttgtgtaagcttcagtaggttagtgcactttgcgaattcgcaggccctatcctgtggtatgaactgagtacgcgataatttatggtgcatattaggggcttaccataagataatgccatgaattcgcaaagtgttcaaacccactgaagtgtaaatatttgtaagtgttcgtgatggtaaggcaggtaagtatttcaaatttatttatttagaaatgtagctgagatattagaaagtttgaacacaaaaaattacaaattagttcgaatgagcccaatataaaatcgttctattcctaagcctcatcatcgaaatttcgggacgtgccagtttcctttttctttccctttcttctagcaccagttggaggtctgcgccctgacaaagataatctttcaggtgaatatcgctcgcggacagacctacggacgacttcaacaccgcggagatcaacatcgtcgtagtcttgggctggctgagttattggtggtggttcatcatgttgcaatggtcctatgtcgtgttgtgctgttgacgagcccccaccgtagctacatggttctccgtatgactgtatgctgccggcatatcccatcatttgttcagggttgtacattcctacaaaacattgaatgcaaagttgtagcgtgcacacatactgaaaataaattattttctagtaaattataagttgtacctgttgtttgtggttgcatgataggtggttgattgaacaaccaatctccatggcctaacatttcgagaaagcttggtccttgtggttgtgtgttttcattcatggacatttgatacatccccctgcaggtggagagctaaattaatatcacaatataaagatagtgaaaaaatgaaacacattatttacgaaccaatgttgaatgttggagctccttggcactaatcattcatacccgttgaaaacatgggcatgttaacttgaggtacacctgcgaaaataagaaaatatgtgcgtggctcagtaaattacaaaatgatgaacattaaaatgtgtgtttattgaactaccggaaaacgatacttggaactgagagcttccagcttctgtatgcatggggggaaccatttggctggatcctgtgaaccacgcaaaccctccctgccattgaccagtggtatttgcatggggaatagaagggatcacagctgtactacctgcaataatctctgtaggtgaacattgaattcaaaaatatcaccaattttgttaacaaaacaaaacgcagaaccatcacataattttagtaaattcgaaaaatgagtccatataaatagtgtgtctagtactttgaagtccatagattaaattagcattgggtacagcaattaattctataagttaggccacttgtacttgttgatgcgaaaaacacacagtggcctggaagatctgcttaactttagtgcaggtccaaaaatctttcctttaggttcgtgagcgtgccagttgatttgatcctgcaatcaacaagaaataaatacaaagaaaccgcgattaaatccataaatgatagccgatcggccagtcgccgatgacatatcatttatctctgagccgatgtcatatttgaatcgatcggcagtcataaataaacaagaaagaactaaatctactcgatcggctgtagatattaacggtatataatacttctgtcgatatatacttaaatcaagtgattgggatagatcggtcgccatgccgagacagtataaatcacttagatcgaaatatacattaacaaggagattataagcattcatagcatagccgataagatagatctagcatgtatcggctaatactccgataccactctatattaagatattaaggcaagcaaaatataccaaacaagaagcttaatatacctaaatgtgatgagatcttaacataagatttaacatatcaatcaagcatatgggatataaagtagttaaatcaggtaagattggctgaaaccctgatgaaaccctaatcggcagccaaaagcaggctagagattgagattctaatcacgacttatatggtcaaactcaactgatgcagctataagtatgaaaagaataacaatatctagacaatcatgccgttggatatttcatagggtggtggataccctatataatctaagtcaacgttgatatttaacttaatcggctgccctccagtgatagacgttagccgactgagggttaaatagcaatattgccagagattatataggatatatgataaatcgacaacttgcataaacaagattagaatgtcataaagatgtaagcactaatcccgagaacgcaagccgccatgacaagtttacctctagttgaagatcgaaacgatgcagctcaactcgaaagtaagaaatcgtcgagatgaaacgaaagtaaaaagggtggcgatgcgccgagattgtatagaacgtgtgttatttgattacatgggttcgggtcatatttatacccgagatacaagatatgtccttgtcggacatgactcttatctctaataaactctaagataccataagtctttacggcagacttttgcccaaacttatctctaaggaaattacataaaatatcctaattaatagatacaattgccatttttaggactcaatccatgtgtggcaatccatatgaagcacattagctcaacccgacgatgtgtatcgagtcacattgtcgaaatcggctcaatcggctaccttgtccgactcaaactctactgacctggtcgcagccgattcggacttcagccgattcttgctctatttccggaacgatctatctcttggattccgcttcgattttatcttaatctccgatactttgaattaccaaatttgatcattaacacatgacccccaagtccggaatatttggtaatgtttcggatttgccatatctgatccccaagaaaatcacatattgccgtttttccgaccgttatcgctccgctttaaatactaaccgtcacccccgagaaacttcacaccgttacttccgttttcaccgccgaagcgattctatcttctctctctccggcgatcccctcggcgaagaaaggcgatctccacagcgattctagctccggcaaacttccgctcgcaacgatgtcgtcctccgctggtccatccgccgctccatcggctgagtacgctgaggtaaattgtaagattttcctttggctagcattcagagacaggctaaacaccaaagccaatatggtcagcaaaaaatggaatgaagatccccactgctccctttgcctgacactagaatcagctgatcacatactcctaagatgcaaaaatgccaataatctatgggaaaaactaaacttattgcagctagacaacaactcagaatcaagcacggctttccttcaagcaatcatagacagcaatcggtcttcaaaaggaatagaaccaatttggttcgctgcttgcacctacacgctatggaaatcccgcaacaacagagtgtttgaaggtcagtttgacaacctacagcacatcacacagcaagtctcagacacccttgatctttggagcatgagaaccaatgaatcaaacatgcagaaaattcaatcctggtgtaccaggctctcctagtataagaacccttgtttatatctttgtaaatcccaccccccgttctcttttctttttatttttgtttcttctcttcttccttttcgtttttttcctttctgttctaggttaactataacctctaacttgtaacctgaaaacctcatttctattaatgaaatgatctattaatgaaatgattataaggtggagcgcgctctaccttcttccgtaaaaaaaaatcgccgtccttctcatcgcatcgtatgccgaaccaactaacgcatcccacggcaacaagcaaacagtataaatccaactattcctatccgacgtttttgctgcctcaaactttactcaggctgtgttcggtacccttagttaccaacatctctctctcgtgttccgcgcgcatgcttttcaaactgttaaacggtgtgttttttttcaaaaagtttctatacgaaagttgtttgaaaaaaatcatattaatcttgtcagggttatggataccatatatctaataatagttgactaaatctcgacaggacccgtcacataccatgtcttatacggaatctgacctcggatatggatgaagttccggataagaaaagacaaccagagttctacatggaaacgacaaggactactcggattgtattcatattggtttccttagttctacttggacaaggtgacacctatgagtataaatacaagaccccctaggaggagaggggatatagagacaatcaacatacacggacaacatagacgccataaaaccacaagcctacatacgccaagacaagccgccggatatcgacttcagcgataagcacggctagtcccctacggtgtcttcggatactgtcaggagagacgaaagcgctatctctgatctcgccgggcacggattcgaggagaaaggctactctgttgtcgactacgagtcagatcttcagaccgccatgtcgacaacagttagataggctactccaaacattgtactggtgtggttatgatgaataagatcaataaccggctttggccaacaggatgtagggctattacttgtcagataaggggcccgaacttgtataaaaatccccgtctccatctcttttatctcagtctcgcgtatatcctagtaccaacgatccccgtaccatgcaaataccggaatcgcgacatcaaacgtcgacaatggcgcgctaggtagggggagtttggtacttcaaggtttcgacgagatgggttcaaaagatggattctctgacaacaagctattcgacgacttcgctgtgggaagatccaacccgaccgaagtatgtctcccgacgagatcggaaccatcgtcatcaacaactcgatctctcgagatcgaccaaacctcaagatacgcggcgtaccaaaagacgtcagatcatatgatgtcaaacaagtacgcggtaagagtaattggtagattggttttttaaattaatctactaatttcgtagatacatccggcatgtatctacaaaggtacgcaatattttatatgcaatttatcatacctattcagatcatacagaattgtcagatctataatttattatgtttacctagagcatgtcttttatacaatatctattgcacgagtatttccgacgttaaaccgactacggtctaacgctgggggcttgctctgttctcttctgtatgaatcatgcttgtttacggtttacgtaatgcctgatatttacatctgctcgtagcatcctgataatactagaagatccatgtagttctttgagtacctactcgatattctctgctatatatcttgccttctagaaagtatttttcaggaacaattgagcacttgagtaggatgtggtcgagtacactgcattatcaagaacgttcttgacaaatgcagagtcgtcgcgcccaaccaaccaacgaagaccgacgacctatctcatacaccggccatggctggactactcgagaaaaggttgttaacggataattgctcacgaacaatgtcggcttgatcacccgacatgatcgcggacagacatccggatatgctacgagttgggtatgtaagtcatgctggccacatgagatacacatgtaataaaccaactctagcgcctccattggtgttcgagagataattctactcgctggttctcgaatcagtaaaatcgtagcaatctctcacaccgcgacttccattggtgttcgagagataattctactcgctcgctggttcttgaaccagtagactgtagcaatctctcacaccgcaacttccattggtgctcgagagataattctactcgctgattctctaaccagtacagcaccgcaagtatgtactatgtttagagttacatgagtggagataagacaatgacaggtttcactgtgtggcaagttggcaataaccatgcttgttgttttactgtatttttttcctcccataataaagtaaagtaggattcctgttcaccgacccggcaaaaaaataattactgctacatgagtcatgagtggaaacaatgacagatttctactagcacaggcagtcagagactgtaagcatgcgcagattggtaatggccaaaattccatcaaccctttgtttcagctcaagatgacaaaactaatttgaagcaaacattcctgattccatgtagcaaacattcccttgtgaatcgaatcgatgatcctcttgataggacataaagatttactggagcttgctgaaaaaccctactgcttgtactgaagtgcaagctactgcttccaataaaatgacagattggagatttacccactatactactctgttgataattttgacagatcaccggcatagcatttacccaaaacaagtacaatgcagaaggggggggggatcggttgtattataatacaactggaaatatataacaagggcaaaaatattgtgctcccaagtttatcgtgtgaatatttatctgaaaaatttctagctactaactagatacaagaggtttcatagttgtgagcattatacaatacggaatacaaattccaagcacacctccggggggacaaaagtagtctatacattctgtcgaaaccgtaatccaggagtactagatatacttacacgagtagttatgtagtaacagcaagcgacagtaaagtaataaccccacccctcactgcagaggactggatatgagaagtaatgtactagtaacagcaagctacagtactagcccaaccctcactcaacgagatcatctgaagcgtttgagagaaatgtactccagagaaaacatatgaattgtgagcagcagaaaaactattaccagacagttaagactgagtttgtcacattcgtcgattaccagaaatgggtgtttcacttgccaccaggagatatgaccggttcacttggtgaaaagctcatctagacgcaagcagaaaagggcaagcagtccttcgtcccacattgctctcattaagccaggaagcgacatgggtagatattggtaaagcagcatgtcaacatcatttgcagaataccatttgaatcgttcagtcctttttgtgagatgatgaatcttgtggcatgagtagttccgacggtatctgcactgctcagagtttctgtctccataggatgtaaactgactgtggagcatccaccaaaggtacgggtgttgctctagacgtaccttccagtgaccacttgaatcattcatcccatagggtagcatcttgaacacttcgaacacagattgaagtgatgccctcatcaatgtttcatagcatgccatgaaaaactgtgagtgcagtttcagtgcaagcaaagcagggtggtttctcatcagataagcctcctcaaggatgggattttctaacatctgcagtaagtcctgaaaatcctcaattaagatatcccacgaacttggtgttcccagcgatgcattaactatctccttgaaaatctgtcctgcttggatataattcattctcattccttcacatgtagcattccttgtgccgcaaactaacttgaaccttggtttgaattccggggtctggtaattgcagaatattttcagatctttcagactgaactctgtaagttccagattcgcagaatgatgactgctgatggtctccagcacccctctcatagctggtttagcccattctgttaatatcactctatcaaacatggagtcgggcgcatctattggatgatgaaactccactgcgggatgctttctgaagaagaacaagggctcatagcatgtttctagagaatgtttatccctatacctgcagacaaagggaacaaaccatatgaatcaacaagcaaaagcatttcctatcattttgcatttcattgggtagtcgatggtgttcccagtgtaaaattcaatgatgctgatgtttggcacatatatggtatactgtatattttagctgaaataagacatgtctagtttgcttctaaaaatttttttagctgaaatatatatatatatcagggttgcatctctactgactgcacaacactgcacctgcatgcccagctctgcttcgcaactcagagtagtcatgaacttgttttttttttcacattttactatttagaggacataaaaaactatggggttcaaatttgttttttcacatttcactaattggaggacatacagaattatggggttcaagaaaaaattatgggcaccacttaatgaaaaactataaaattatgggcactacttaatgaaaaactataaaattatcggcgccacttaatgaaaaaactctctccacgaagcagggtaaattttgcttttggagacttactgtactgttggatccagcgcgtgcagataagcggctgtatcctgcggagaagttggcggagaaaagcaatctgacatctcgtcgagtacgggcggaggaggggtagtcgacggtggaactgcatcgtcagtctcaaactctcaatcggtgaggtaggagacgaagtctcgccggttttcatcgtgtgcagggaaggaggcgtcgccgcggtagatgatgctcccgttccgaaccaccgagacgccgtccttcctgtccacgggctcccggcagacctcgaaggggggcttgaacgaacggtgggaacgatcgcggcggacgtagcgggagcaacgctccgaggagggagatggggcaccgtagtggagaatgcgaactgaggaggcagcgcacgaaccgccgacgacgaagacgaccaccctagccatggccggaaaaactcctgtagatgagaacgtattagcgcggaaacaaacgacggggagaactagacgtggatgacggcgatacctgcaccggcgcgacgatggagcgacgccccgccggcgccgacaccgcggcggcgagaaccctcgccaacctcgccgccttccgcatttcgcgctgatgaactgatgattttggtttggggattcctgagatggaacggggggtttgtggggtgatcgttttttttttttttttggtattctgtaaggggggggggggggggggggtttggggtttgcgaggtgggctgttaaatctctcgtataaaattaaacttcaaaaataggaagcactccaaaaaaaatattaggctaagttctgaagtgctctactactatttgattgagatttccaattcacgtaaaacaaaacaaaagtagtcattaacacacaattaattaagatttagaacttaaaaatgtgtttgatttttttttagaaacttgtacttaaaaacacattgtttaaatagtttgtaaacgtgctcatggttaacgccttaatgaaaaagtggtccaatccaaactcactttcgaatctagcccaacattgagttcttaacggagttttggctaaaagaaatcactcgtttaatgtgatcacgctttccatactattaaatagtgtatttcgtctaaaaattttctatataaaaatatctttatcaaatagttaaatgaatttaattcttaaattgataggaatagtaattaacactcgattagtcatttgctaatcgctccgcttgtttgacatgccaccgaaaacataagataaattgcctaatggagctaggcctaagattgtactagtatttgactaaggctgtgtttagttccgaagtttggggagaagtttggtagtttggaaaaaaaaaagttaggagtttatgtgagtaggaaagttttggatgtaatgtgatgtgatgtgatggaaagtttggagtttgggggaagtttggtgtgaactaaacagggcctaaaaaggacttgagaatctatcttgtgactcttgtcatcgttggtggaccttcatgaattgatttgtcgagtagccacgtgagaaagttgtcgatgccgaccaagtagcagcccgaggccccttagccgggcctgcgggtgtagtccgcgacgctggcagaggaggcgccgcgatagaggccattgccttcgttggtggaatccatggatttgttagtggcgctcgatcctccacctctacggcatcggaggcgagggtttccgtcgacagccagtgacgccacaccgccaacgcgttgaaggtgagggttttaggcgacgtcctccacgacagctgaggaggaggggaaactggcctcgcggtgagagtggggcacgccgtcggcggagcgcgaagccaactgcgccgtcaccgcgtcgacaacgaggttgagcattctaggtgccgcgagtgtcggcggcgtcgccgactttggacctcgaagatgacgcacgaggttggcgacgacggacgccgtcttcggcagcaggattgacgcgcagatccagccgccccacccctctgccgcgtcggcggcgaccttccacatttatccggtggctccgatcggcgccacgctggtggtgcggttttttttcttcgggtttaacggaggggggttttgggtatttaatttttttgccactttgaagatttggctatctatgacatgtgggtcattacatgtctatgacatgtggaccccgtggtaaattcttagttactttggtaaattagttaattattattccttggtgggtcccatgtatcaaacgtgtaacgtggacccgagactctattcgtaacgtgccagattgacatgaacgtgacaacgtgtcacgaatttttactcttcctcccccattctcgcatcgtccaatctctccaccccccccccccccccgcaccccccaaaccctaaccgcctctccccccgccgcgccgtcgccatggacgccatcgacgcggagctcgcgcgggcgcaggaggagcgcaagaagatggaggaggcccttgccgccggcgcgcccatggccgtctcctccgtcaccttcgacaccgatctctacggcggcggcggctccgaccccaaccgcttcgccggctacgacacctccatccccgcctccgaggacgacgcgcccgaggacgactccgaggcggccgtcaaccccgccgcccgccgcctcgcctcctacaccggccacgccgtcgccgccgccgacatcccccgcgccgccgaggacgacggcctccccaagaagtcgcagcgcatcatcgaccgcgaggatgactatcgccgccgccggctggcccgcatcatctcgccggagcgccatgatcccttcgccgccggtgaggccaccccggacccttccgtgcggacctatgccgatgccatgcgcgagaatgacctgcagaagcagaaggagcagctgctgcgtgacatagctcagaagaagaaggaagaggaggagaaggccaaggagaagaaggccgtgcccgagcagcagccagtggcagcgccgaagcgccgcaatagatgggatcagtcgcaggatggtgatgcttctgctgctgctggatccaagaaggcgaagacctcctccgattgggatgctcctgatgcaactcctgggattgggcgctgggatgccacccctggtcgtgtcggggatgcgacaccgtcggtgagaaggaatcgttgggatgagacaccaactcctgggaggatggccgatgcggatgcaacacctgcagctggtggcattactccaggtgccacaccttctggagcttgggatgctactcctaagctgcctggtgggcttgtcacgccaacacccaagaagcagagatcgagatgggatgagactcctgcaagtatgggtagtgctacacctggaggcactggtgctgcgacgcctgcaggttacactcctggtccgacgccatttggtggtgacaaccttgcgacgccaacacccggccagattgcttctcgtggtccaatgactccagagcagtaccagctcttgcggtgggagcgggacattgaggagcggaacaggcctcttacggatgaggagcttgatactatgttcccgcaggaagggtacaagattcttgaacctccagcttcataccaacccatacgcacaccagcaagaaagctgctcgctacaccaacaccattgggcacaccattgtatgctattcctgaggagaatcgtgggcagcagtttgatgtgcccaaggagttgcctggtgggttgcccctcatgaagccagaggattaccagtactttggaacattgctgaatgaggaggaggaggagcagctatctccagaagagcagaaggagaggaagatcatgaagctcctgctcaaggtgaagaatggcacacccccacagcggaagacagcacttcgacaactgacagacaaagcaagggaatttggtgctggcccattgttcaacaagattctacccttgctcatgcagccaacacttgaggaccaggagcggcatcttctggtgaaggtcattgacagggtactgtataagctggatgagctagtccgtccgtttgtgcataagattcttgtggtcattgagccacttctgattgatgaggactactatgctcgtgttgagggccgggagattatctcaaatcttagcaaagctgctggtcttgctaccatgattgccgccatgagaccagatattgataacattgatgagtatgtgagaaataccactgctagagcatttagcgtggtggcttctgctttgggtatccctgctctcctgccattcttaaaggctgtctgtcagagtaagaagtcctggcaagctcggcacactggtatcaagattgttcagcagattgctattcttatgggctgcgctgttctgccacatctcaagtccctagttgagatcattgagcatggtcttagtgacgagaaccagaaagtgcggacaatcactgccctttctcttgctgcacttgctgaggctgctgcaccatatggtatagaaagttttgatactgttttgaagcctctgtggaagggtatcagatctcaccgtggaaaggttcttgctgccttcttgaaagctattggtttcatcatccctcttatggatgcgctgtatgccagttactacacgaaggaggtcatgcaaatcctgattagggagttccagtcaccagatgaagagatgaagaagattgtcctgaaggttgttaaacagtgtgtcagtacagagggtgtagaggctgattatatccggaatgacatccttcctgagtttttccgtcacttctgggttaggagaatggctctggaccgcaggaactataagcagcttgtggaaacaacggtagagatggcaaataaggttggagttgctgatattgttgggaggattgttgaggatctgaaagatgaaagcgagccttacaggagaatggtgatggaaacaattgagaaggttgtggctaatttgggtgcttcagatattgatgctcgtttggaggagctgcttattgatggcatcctgtatgctttccaagagcagacaagtgatgatgcaaatgtcatgcttaatggttttggagctgttgtcaatgcactgggacagagggtcaagccttaccttcctcagatttgtggtaccattaagtggcggttgaacaacaagagtgcaaaagttaggcaacaagctgctgatctgatctcgaggatagctattgtgatgaaacagtgtcaggaggagcagcttatgggtcatttgggtgttgtgctgtatgagtatttgggagaagagtaccctgaggtgttgggttcgattcttggagcattgaaagctattgtgaatgtcattggtatgactaagatgacaccgccaatcaaggatcttcttcctcggctgactcctatcttgaagaataggcatgagaaggtccaggagaactgcattgatctagttggtaggattgctgatcgtggagcagaatttgtgcctgctagggagtggatgaggatttgttttgagcttcttgaaatgttgaaggctcacaagaagggtattagaagagccaccgtgaacacatttggttatattgcgaaggctattgggccgcaggatgtgttggctactctgttgaataacttgaaggtgcaggaacggcaaaaccgtgtctgcacaactgtcgcaattgccattgttgctgaaacctgctcaccttttacggttctgcctgccctgatgaatgagtaccgagtcccagaactcaatgttcagaatggtgtcctgaagtctctctctttcctctttgagtatattggtgagatgggcaaggattacatatatgctgttactcccttgcttgaagatgctctaatggacagagatcttgttcaccggcaaactgctgcctctgctgtgaagcacatggctcttggtgttgctggcttgggctgtgaggatgctcttgtccatttgcttaactatgtctggccaaacatatttgagacatctccccatgtcatcaatgctgtcatggaggcgattgaggggatgagagttgctcttggtccagctgtgatcttgaattactgccttcaaggccttttccatccagcaaggaaagtacgtgaagtatattggaaaatctacaactcactatatattggtgcacaagatgcgcttgttgctgcttatcctgcactggatgacgatggggataatatctacagccgtccagagctggcgatgtttgtctgatcaatgtaagtgttgtttctttcctattattttgcttaaattttgtggcatatattattgaaacttctgctgttagttacgaagtaagttgtgatattgtatcatgggttcatatttgttcattcaggtgctttctttttctaaagagcaaccattgcattactcgtatgtatgattccttttggtttactgctgtccttgcaagtgttttatcagtttgtactgttcctcaacaaatgggcatccttagcctgggctactgtatgttattaggccttaggcagtttgacctgttggaataatgttaacttgaaacaacttagaaaaatagagctcagctttttataactcactttacatttacattgatatgttagaattctatggtcttcttggttacttggtttcagtgaacatctatcacgagctgcctatattgaatggactaggttgcaccaacagctattttgttcggtttgctccttttcagtggtgccaaagccttggttattgttatcatatgacccatagtgtgcaggcactagttcgtttttcctttcatgtttctttctgcaaatttgctttatgttctgcctttttcttccctctatgcaaagaacacatctgatgtgagaacgcattggcaggcaggatgtacatttccatgtaccgtcatccaatatatgcgtgtgaactgtgaagcttgaactcggtggtatttgagttagctgatattcaatttatggtgtttacttgtgatggatgcattttcattgaagttgcatttcttttttctttatttgcaggcttgttgcttctgaagggggtgcaatgtttaggatatatttccccctggtttacttgtgtaatgtaatgataaattgctacctgttctgatgtactgacgtttttgttactggttttgtgttcagggtattttgacccggtttgctgaggagttcccttagattaaagatcccaaggagatgatatctgtcctgaatgtttactttgttgccgttgcatgatcccctccgctctgaagagaaaatgatcaacatagtattactgctgtcccaataactgtattattagcaaaaaaatgttataagctactatcgagattgtgaacttgtcttattattagagtctgtattattaatgttattactatgcctggaacgtcacttatgtatgtctggaacgtggtattagtattactaccctgctctgagttgatggatcaatggatggatggttagatcgtatagtgtctgttttcttcccggactgttagttgttactttagaaaatgttttaaattgtattgcgtatgttgtggtttgtgatccatcagacaagctcctcatcagtcactagttacctaaagttgctttaaattctgtacctatctgagaacatgagttgtggatgtcgaacttatatttgatagtacagaacacgaattttgcttgaacattgcaacacttgtgaattttgcctggagaggtggtacaaaatgctcaggaatcattccatattcccatccaacccaacgcccatcagtagacgacgacgtcgacgcaaacgcccacagatacgaggcacaaaatcgtttctctccgcgtcgcgcacacgccacgcaagaggaccaggtcggtccggtgcgcgtgcacggtgcaccacacccacacccgtgtcggacgcgacggctcaaccgctttgacccacctgtcagtcagagccaccaaggcccgacccaggctacagagcccacctctcctcctccgtccggttcgcgccgcgctcccttcgttcgtgcgcttcctcggtcgccggcgatggcgatggcgatggcgccggcggtggtctcgggcgagaggctcgtcgtgttcctcttcgtcgcccgcgtcgcgctcgcggcgccggcccagctcgccgccccgctcgcggtcctcgccgcggccgccctcgccgtcgagctcgccgtggatggctccgcctccgcgtcctcatcgccgctccgccggttcaggaccaggtgcgacgttatatcctcccccccgctcttatccgtatcttcttccgccgcatctccacggagctgggctgctagttcgcgcgatttggttagctcgggggattgcgcgatcttgataccagtgttcgagtttcaaactccacgaattaagtgttcgaggagctccctgtgatgtcagggaacctgcgaggtgcagtgttttgcaaaattcgttggcgcagccgtagaatctgaggcgaattgatccatttgttggttcagtgctggctgcctccctgtgaggatcatgcaattggggaaacgacatcagtcggattcagcattccgcaggaatgcgattttacttgtacttgaggcttactgaattttcttttggttcagtagtgtgtaaaatggtcaggttttggtggttccaagaatccaagggacaaatatcactcttgaataattgggtttcagcatttcttagttgacccatttcacaaatggtaaattcagaggtgcttctatcatacagccagtcaaaatattgctctcattttgatggccaaaataatgttccattgcattttcagctaaaacgttgctcccactgtcatttatatgggttcttttatgcaatgacaattcaggtggggaatctctcccccccccccccccccccccggtgagttagtcaaaaaatttatatgggttctgtgatgtgcaatcctagttgcttactgtaagattttatcacgtcttgtgttgtgaggacttcaccttcttgtggtggcttgatgctcttgtgcatgtttctgtaaaagattgttaagtgcttgatgatgatatatgtatatgctccaggccgggtgcttcatcaggcatacttcttggtgccactactctgcctagtgtcatgctttcacggttaattcaactttatagggtcttactagcagatcctaatggacgtgaaggtatccatttttctattttgtcaaatttatcagatccactgctaaatggaaatttccctaaatcttcatcaacatttcaaatcttgtttgacactaagattttcggtgacgcatctggtttactaactacatatgtgttcattgtcagaatatgcataccttgaaatgcagtactgggcagtatctgttagctgccttggcatgttatcattttttgtttggcatctacggcagtctcccagcaatggaaattctatagcttcgaaatacggcttgttgctcatcattttatatcccctggcatacttgttccaccttttactgaagactgatggaggtacatgcatattttatctgcatgcaaacataatctcaccctttctttccaaaatctggtggaagttcatcagaagcaaggaattacaaactaatctaggttgtcttaacaggtctgctggtgatgagtaatttggtgtatttgctgtgtcatggagtggctgctgtgatcttaatccagcatattctagagaagttcccttcatgttcatcttttggtttgtacctgaagtctaagatgtagttagatctttatttttttgtttatatctgactgcatatgtttagactttagagctatccatacgattgctagttatcctaccagttttccatgcaggcatagtgcattatatctacactgttcattttttaaaatttaaattcagctaatttgtgtggttcctattggccgatgcaatgtatatgtctccttttcatcatgacttgaagctattgctttttttaacttatctttacattttctgtgaacttaggggaggccattttggtctcaagtggtcttgttctttactgtggtgatatgctggctcatactctttcaaaggtgtgatttattcctcgaactatgttttaccagcaaaatggtagcaaatctgatacttattttgttgcctgcacatttgcaaccgtgctgctggcagatggagttctccgtatcatcagaagcatttattcgcgcacctggaactcgaagcgagataggcacagttattcaggtagaagctattgcgttctctggcttcagtttcttagtgcataatacccttcccttttttttcttttctgcagggggttttgcttggtctttttcttctccccttgttatacaaaagctcccttcaagttttggcttactgtagaaaactggagagtcaaagaacacaaacagttgaggaatgcacacagaagagaattgactgtggtgtattttatgtttcattgttggtagcactattgttgttagtgccatcatggacgcgtcttattcaaggttttgaagtgcatccatttgtttggtgagcatataagtttgcatttcattggaagggcataaaagcatgcactctgttagtcaaatattgaaaaatttcttcctgtgttgcttctaaaccttgtgcatttttgtacgtattgaattttggttcacttaatggtttatattcacagggtttttaactatattttcaccgattcacgtgaacggcttgctttatgcgcatactggatatttgtgatatatgtatcaattagaaggttctacagtatatcaaaacaaagcaaaacggagaggattcttttgcgcaagtattaccatctcgttgctgtcctaattttctctcctgcagtaatatttcaggtaatatatgttttcgatattcgatccccatcagattgtttgaaacacactctcaataaattgtttctctttgcagcctgatttcttggacttagcatttggtgcagcatttgccgttttcttaatattggagatggttcgagtaagcattttctttatttgtgtccctttcttttcccccctctttctgttttttggcagtttgtatgcccacatgtgctaatttctccgacgaaatgtttcactctgacctcaggtttgggaaatataccctcttgggcatattgtgcatcagttcatgagtgccttcactgatcatcgcgattcggaaattctaattgttaggtaggtctggattaatggtcgttgttttccagattttaactcatttacatgttcagtgcttggataggcctaatactatatttgttttgttcagtcatttctcactcttgctgggatgtgcacttcctaaatggatgtcatcaggattcaatgaccgacctcttacaccatttgctggaattctcagcttgggtattggtgataccatggtaggttctatgtccagtgcgtgatcagttaatattttcttatgttagctgcgttcagtatgatgaattctcttgttttacctaggcatcaatgataggttataagtatggtgtcctaagatggagcaagacaggaagtgagtttaatttccattattatttattccatgattgataattgatctcttatgcacatacttttgaaatgttagagaaaacaattgagggcacagcagcaggcataacttctgtattagcagcctgctcaatcctgctgtcactcttagcttcaagtggatacatactttcacaggttttacttccccccctggcattaaaccatttgaagcttttattctacaatatactaagcaagcataaatcctgaccatctcttttatattaacacagcattggatatcacttttggtagctgtgacattgagcggtttattggaagcatatacagcccaactcgacaacgctttcataccccttgtcttctatagcctcctatgtctataggagcaaccaattgtacatcaaactaccttgaggccctattcttaccattactaatatctagtgactagtgcagtacagtataggtatagcccttcgaattttttttttaaatcctcttattggtcgcattctctgtattcctggaccgagaaattgtgtccattactaaaaagttgagtttaggtttaggaaataaagatgaaaatatgaaaggttgtttagtgaatccttcagtagagagcatctttggtatgatagacttctgagcctatctggaggcatcaatgtatcatggaaggtatgttgtctttcagaaccagaacttcttctgcaggtggtgagacctatttcaccccacaactccacaagcagttgggcaagaatagcaagctgagagtaaagccatatgctgcaaggagcctgaaatacggagacttggttcagaattaatgtatatggtaccttatttccatggacatgcgaagtgtaattagttgtagtagctaatctcctgtaagttttgcgtcatcactgtacggagtaaaagatcactactcagattgcaaccgcgcattgatgtaaattttgttcttgacctgagaaaaaatgaaatcgaagtaagcaaagctgcaaattaatgttctcttattgtgagattggcaggtttgcgatgtttgagttgtttgtgtgatctgtttatctatcaggatacctccacctgccgacttgctgtgtcaagttcagtcagatgatccttgcctaattgtctaattgaacaaaagttcagtcagtagtctttaatatggtattctaagtagtttttttttcaaatcaagctgatgaaaataatccatgtccttaatatggtattctaatgtcagaatgcataggccaaaatgaattcaattatcttaacatgaacttctatgatccaagccccatgtcggttgcgttgagctgtccgcgttggaactcgcaacgcacccatgctccatgttcttgcgcgattgctgtcgtgccgactaattaattacttgcccgcaacgcaacatgacatactgcaactctgctcaagttcacatccggtccatccaaaaagtactgaattttgcatagtttccttcttttccttttctcaccgtgtcaaacaacaccaccttgttacccaaggaaaccccgggagtcatcgtcgcaatcacagaaacttcacagaaaacagtaagtattcaattcaagtacgtctagaccaaaaacacaacgaaacctaatcaaactccagccgaatttcgcagaatttcgaaccacctttggcaaccaaccatcccacaaacacacacagaaaggaaatgtccatacgtactaaaatttccttacaaaatacttatagactatgatgtgatgagctctaagtaaatctagatctcttgtaactttcatccatctaattaaattaaacggttataaaaaatttgttagtatgacttttgtaaaaaaaattaggctgtgttcttccccccattttccgaacccacctctttcgttttccgcgcgtacgcttttcaaactgctaaacggtgtgacatatgcaaaaactttctatatgaaagttgttttaaaaaaaatcatattaatctattttttaaaaaaatagttaatacttaattaatcatgcaataatacaagtttcgttttgcgtcctcccgaacacaccttagtacgttatctctctaattgctacattttaggatgagggtggtgtaactgtgcttataatttttttttaaaaaaaggaaaggcccacacggacactaggcccaaggcaagcccaccactcgtgctcgtaacggaacggaacggaagcaaaccctaccccccgtcttactcatactccacactccacagtagcagccggcccgtagaacggaacggaacgggaagggggagacgagacgaggagaagagaagagagaagaggtcgagccgcgctccgcctccgtcgggtcccctttataacctctctctctctttctctctctctcctcccaaaccctcaatcgtcgcatcgcctcctcctcctctcgccgctcgcagcgaaaaagccagcgcctcccagcgcccacgcgatcccgacgaatcgaatcgagtccgagacgccgatctcggattcgagaccgttgatttcaaccaacacaagccctcctccggatcgatccgctcctcttcaggtaacaatgaacgatgggatgggatgggatcccgctgaggatgcttttttttttctgttttgtttgtgctcgatctggattcgggttggtccggcttggcgctggctcgatctgggtgtcgccgggtggtgggggcgtggatctgggttggttcgatgtgattttggcgagtctgtgagagagaggggtttgggtgggagatgcgtgactttgattgctttaatgatgtttagattgttatatctccgttggcatgtttgttatccttttgagcagctatagaagtggtatgtggtgcttgacaatagtaattgatgttttgggtgtcctagtgtttgcaaatctaaaatttgtaacatgctagtatatgtacttttttttaatgactgcgttagattatttgtcctgctaagcacttcgatgtcctgctttgtactttgatgactgttagattattatcctttgtatgccaaggacagtggaggaaccataggaagtcgaaggtctttatggaccaaacgaaggtcttttttgggccaactagtttggtctgttcgcttattgagtatgctgtgttaggaggattccttagattaagctccacatgcagtatccattgtatactgagcttgatctctaacctgttaggtcgattaagtaaattctggactgttgcgagtttgtgtttcccggttcgaagatttcatgttgtgtgttgtgcataaaccctgttcgaagagatcatgttgtgtcgtgcatagacttcaactatgggtgctatgttccttgtgtgcagcagaaagctataaatgtactaacatttattgtgcgggtcaagactgcttttacaactgagtttactactactttgtgtccttcaaacattattgccattcatcctttgtaacctgctcttttttttcccttgaatacagccatggcaggaatggcacccgaaggctcccagtttgatgctaagcactatgacagcaagatgcaggaactactgtaagccatcgttctattctaccgtatttgtaatcttagtagcagctaatggatgtttgatttctcatttgcaccactcgttatgctatatgggtttcattatggactttgtgtctctcgcaacatgcaggcaccaaggtgacaatgaggaattcttcacttcatatgatgaagtttttgagagttttgatgacatgggcctccaagagaaccttctcagaggcatctatgcttatggtatacaaaaagtcttatcccttttccattgtttcaacaacacatattttggtgatgttacaaatccctgtactttgatgtgtaggttttgagaagccatcagctattcagcaaagggggattgttcccttctgcaaagggcttgatgtgattcagcaggctcaatctggaacaggaaaaactgctaccttctgttctgggatcctgcagcaacttgactatggattggtggagtgccaatccctggtccttgcaccaacacgtgagcttgcccagcaaattgaaaaggtcatgcgtgctcttggtgactacttaggtgtcaaggtgcatgcctgtgttggtggaacctctgtccgtgaggaccaaaggattcttgctagtggtgtgcatgttgttgttggcacacctggacgtgtgtttgacatgctacgtcggcaatctctccgcccagaccacattaagatgtttgtgctggatgaagctgatgagatgctctcccgtggtttcaaggatcaggtttgcttctgaccagcccattattctgctataatacctccaacagtttgtatggctgatcttttacattatgtcttctgtagtgttcatgtttgtgtaattgtgttttaagagtgtttcaagcatcaaaatctgatataagtacaacatatttatggaattgttatctgagtgcgcgctatgcttatgtttatgacttaatgttactattcttgaagaaatcataggtgattactagtttgtaaagctggtagttcatttttaggactcttttaggacttacagtttctctctctctttttttttacttgctgaccttcacctgcttcattggctatctgttaacgcaacaatatgactgcatatttttaatacatgtactatgtgtgtctaatggttgatgagctattatggaagttgtatttcatttctttatgctgtagtgttgcatggtctgaacttacatatggtgttcccttttcagatctatgatatcttccagctccttccaccaaagatccaggtcggagtgttctctgctaccatgcctcctgaggcccttgagatcacccgcaagttcatgaacaagcccgtgaggattcttgtgaagagagatgagcttacccttgagggtatcaagcaattctacgtcaatgtggagaaggaagattggaagctcgacactctttgtgacttgtatgagacactggccatcacccagagtgtcatctttgtgaacacccgccgcaaggtggactggctcaccgacaagatgaggagcagggaccacactgtctctgccacacatggagacatggaccagaacactagggacatcatcatgagggagttccgatctggttcttcccgtgtgcttatcaccactgatctgcttgctcgtggtatcgatgtccagcaagtctcccttgtcatcaactacgacctgcccacccagcctgagaactacctccatcgcattggtcgtagtggtcggtttggcaggaagggagttgccattaactttgtcacccgcgatgatgagaggatgctgttcgacatccagaggttctacaatgtgaccatcgaggagctgccggccaacgtcgctgaccttctctagattatgtcttaggaagtaaggttctggataaaagtttgtttttgtttttgttttaatatgaccaactttctcgtttgggaggagtggtaaggacggggtctatttgaattgtggttaaggacggcttccatgtttttctcttttccgtatgcaactatgtttggaaatttttgtagctgttaggctgtgctgcttcctgggctagctgggagagggagacactactggaatatttactttctttattaagctatgcttgccttgtgttattattccaatctgctcttacattcttcagctgtttgcaatccgtacaaattttgttcttattggtaatgtgaaatctaacttgtttcgagaaaaagtttatgttcaacttatcaagaattctgctttatcagcatttggtggtgagaagatcttgtgcagttacacgttgtggatcaacctggtaaacattattgcagtactggttggctgtgtttttttggctgtctggtccaaccacagcaagatcacaatagcaaagcaagaccacagcaagatcacaatagcaaagcaaagcttgtgcatcagtaatggacgtttggtgagtactattacaaagcgaaagcgatgggcgttgattatgattttattgtgcttgctatccgattcagagcctcatcagcatcatcctgtcttttgcgccttttcctctctggactggagtcactggagtgatggcatggggcatcttattcctccacttgctacacaaaagagctagtactatctttgatagggacactggactggagaacaactctatgtgcctggagaacaactctcctataggctgtgtttagttcagcgcgcaaagtttggatttttattgaaattggaaataatgtgactgaagagctgtgtgtgtatgacatgttgatgtgatggaaaaggactgaagtttggatccaaacttaactttagatctaaacacaacctgtaaattactacactgataggagcactatatcatacagcccttgacgccaacaaaataaagtactgtccatatatatatatatatatatatatatatatatatatatatatatatatatatatattccaatttgtgttctctgacctcctcgatcaaaaagctttctataacaccgaaaggtgaactttcaattgtcatttttgcttttataaccctgaaaagtagaacattcaaggtcatcttttggctaatttgttagacaatggaagctttttaattgaactccccaattacattgaaacgatacaattgtactaacactttcgatctctacatagcaaggatatacatggccaaagcactctcacaccctctcgtttgaattcgatacatgaagttttaaaacttatcaatccgtagactagatcatcctgggtaaaaagttctctaactacattcttcaaaggcagacatgtcgcaagttccaaatcatgtgtacctggcttgagaagtactccctccgtcccacgatataagggattttcagtttttacttgtaacgtttgaccactcgtcttattcaaattatttttacaaatataaaaaacgaaaaattgtgcttaaagtactgtagataataaaataagtcacaaataaaataattaataatttcaaatttttttaataagacgagtggtcaaacgttgcaagcaaaaactcaaaatcacttatattatgggacagagggagtacaacgttttgataagtataaacagtagccttttgtccttttgtgggaaaagtattccccacatttttcgctaatacaagaagatgcacccacgtttgctatcacatcgtgcgttacgcacacataaatctccttgttgtttcagctagaaatttcaaccttcctattttattaatactactaagatagtattctgatttagtttttgtaatttgtaaaatcttcaacaaaaagttcttttgatttgaaaacttgaacttttgagttcagtttataatactaaaaccttgaggtagaaatgtgcagctttctatgtattagcactaggagacaatactaatgatttagtttgtgtaaccagtgatatattcaaactaaaaagctttcaactgaaaattgtcaactcctgagttcagccaatgtccaacttttggttcttctaaccaaagtttcaccatacacttttgtcaacccatatttttaccttggaccatatgaccctatattgtttgaatttcattgtggacctccttttctgttctcctgatgtcctcattaactgctctccttagtcctagcctcctaggtttcaagtatttcttaatcatatcgatttgtcaagggttggttgctttttccctatagaaccagcatcgaagtctcgaacttgctcatattttacctagattaaatgaaaggtttgaaaatatgtggctagtcctatcctatcctaattacatcggatggctagcttctcctaatcatctcagttttttttttcacactcagtcctcacaccaacactgcccctaaacatctccactgactcataaattatggccacgtggcgcgtgattttgagaagaggaggataatgggggtccaaagtgaaataagaaaaataaacacagacaaaaaaaaaaactaaacaaggcactaagaggaaaaatctgacaagccgaaactgaaattcactcgaaagacaaccagattggttctcccttttgggccactcgccacagaatgagcccatcaaagccgaagccttccctttcttggcccaccaggcccggcccacccgttcgcgaaaaaaatccaaggcccacagatccattcttggaggagggggcaaatcgagtcgaaacgaagccccccgtcgcctccgtcgcaagcaaaccggagatcccctttcccttctttgctcccaccaccgcctccacctcgcacacccagcggcggcggcggcgcccgcggatttctcgctcgcgcctccgaaaccctagctctcgcccgtagtagccatggcgccgcccgagaaccccaacggcgcgggccccgcggcgccgtccgaccccgcgcagccgcagccgcagccgccggccaagtccaagtggaagaagaaggacgagaagaaggatgacgatctggtgagtgtccccccgcgtccgttccccggcgcgcaacggccgatgggagggagatcgagattcggaacctcggtttttcgtttgctggattcgatccgtggttttgtgttgactgttttttttggtgggcagtcggaggaggatttggcgctcaaggagcagctcgagctctacgtggttcgggcgcaggacgcggatcccggcgtgcagaagctcgcgcttgagagtatgaggtgctgttcgcttgctgaaattaattaaccgattcttttttttagggtagggtagcgtcgcgtcgtttcctgaatcccagtaggaaatctaggtttagatttctggtctccaggcaaattttgtaaatgcagtggttcatagggtttattttgatccaccatagttagatttacttggttaagaccaaattttgttgctttgatttccatcttctgtcactaaaatatcatcctccctaaaaggcaggagattcgttccgccacaagctcaatgacatctgtaccaaagccactgaaattcctccggccacactatggaacactcaagtcttactttgaaaccatgccagaatcttctgatttgaaggtatattgtctgttgatttcccagttgtgcagtagcctaactttctctttgtcacagcgatgaatgctgatagtaatttcttactgtttttagaggtacatggccgacattttatcagtgttagctttgacaatgtccgctgaaggagaaagagtatgttcctgccacaataaaagctttttgtatctaatctgaacaagatatttctttgtttgaaacttcagtacttttcctaatgtttttttgcctattacttgtttcaggaaagccttaagtaccgtttgttgggctctgaaggtgatatcggttcatggggtcatgaatacgtaaggtaagggcaattttacatgtttttgacattcatattttgccttctaaagtggtatgatatgcttgtgccattattctaaagtgataatagtgttagttagctgtaacttgcatttgtgtcatgaactgtcacttcctactccacttatatttgaaaagtttttgttttttcattcttgattcttacttctgtccaagcatatgtttgaactccagagtccagacaatgtttctgtccgtgcttttattgggaatgtcaaagcgtgcctagtttatattttgaggtgccaaataattgagattgaactaaacagctttgtcaattattgttaactaatattcctgcgaccaatatactgagtaacttgtagaatcatgggacagaactaactttatgatagtcatagcactgtattgagttctaaactatacagttttgtttatgattaggaatgttttttttgaatcaatatgtcgattgtgactgaggttgtatcgttggaaccttttaattagtgtctttgacattttattttgcagtgacttatccctgatttatgtccaaattacctgaattttagctatatttgatattttaacagtgtattcaaactcaatatattatactaatgttttttttttgttttcattacatatttgggttctaatgaaatagctgtctcttgtacagaaatttggcaggcgaaattgcacaagaattccaaaagcgtcaggtaccactctcactttcatgttaatagaagctctgaaacttttacattttttttgttaccttgtatttatcttcccttcatgactttgttctgaagttgtgataaattgtttcttttgttatttggtgacttaattcactacttcctatcatggtccctttctgattccagctatttcaatagctacgtatttgttccttcttgtttttttgttaaagcttgttgacttttgaataacatgcccagagacttgcattgatgactgttggatagctgaaataagttatgaggttaccatgttaagaaaccgtcgtttattctttcttgccccctatgtgattctctcgccatgcatactatttgtccattttaattccatgatgcctgtaactaggacaacgtttctttaaatgttttgtttgagtggttggaacctttgattcaataattaattgtttcacaggatgatgacatgccgattgacgctcttatggaactagtgcagcaaattgtttcattccatatgaaggttggttgacttgattcttatcagagattttggttttggtatttaatttgatgctctgattgatgccacttagtagctgtagctgttgttatttgtttgacataattaatgcattaatggtgctttattgtaatttgtaatgcagcataatgctgaacctgaagcagttgatcttctgatggaggtattttcatatagtgtactaattaactcagattttattattaccacaatctgtctactgatggctatgctgatgcatgacatttcatctcctttgaaggtggaagatcttgatttgctagttgagcatgttgactctacgaactacaaaagaacttgcttgtaccttacaagttcatcgaagtatgtaaacacatttttgttttgttttttgcctccattatatgtctctttttccacgtgttgtatacttttttatgctgtagatcctgtggtcctaatctggcaagatttccttggagtagctgaattttgtactttagtgttaaatttcaattgaattgaattaatagctgcatctttgaatgtaaaaccacagatacctccctgctcctgatgacatgttggcgcttgacattgcttataccatttacatgaagtttgaagaccttacaagtgctttgcggattgctctgctccttgacaacaaggtgagctgcttgccatgctattcttctctttgtatgactgaattggaactgacgtacatctccatcgtttctagtcaatgcagtatgtgaagcaggtctacaccgcaactgaggatcttcagctcaaaaagcagttctcattcatcattgcacgccatgtataaatctctcacgcactatctaccttggttgccaccttttgcatcttatgctaaaagtagcaatcccttaaatttgacccaagcgcttctcttctgcagggtttggccatggagattgacgacgagatagctgccgatggcaatgataaggagggtttgcaagaaatcgttaataatagtaagctgagtgaggggtacctcacccttgctcgagatatcgaagtgatggaagcaaaatctccagaggatatatataaggtcatctatattttactatcaatgtttattaaggttgcttttttcattcataataattaatatttgtatttaacaatctacaggtccatttaattgatgggcgtggtgccagctccagtcttgattctgcaagacaaaatttagctgcaacatttgtaaatgcattcgtaaatgctggatttggtcaggttagctctacaaacaatatgttacttttagttctttccgaggaaagaatgaatctcaagaccatatcttctgtgcaggataagttgatgactgctccatctgattcttccagtagcggagcttctggaaactggttattcaagaacaaggaacatgggaaagccagcgcagcagctagcctggtaagttacattgttattgatatttgacaaactctacaaaccattgacaactgagttctttaactggtcaacaataataacaaaagtactgtttcaccttttcagggaatgattctcttgtgggatactgattctggacttgctcagcttgacaagtacttacatagtaatgatgctcatgttgttgctggagctttgctaggtattggtattgtcacatgtggtgtgaagaatgattgtgatccagtatgtgctccactgtctaagtttcccaacctccatcctactgattaatattgcaaatcttttcttaatacccaaaattttgcaaatactttctttaataccctaaatttgctgccaggcacttgctattctcatggagtacattaacaaggatgacacaaacattcggattggggcaatcttgggtcttggtattgcatatgcgggttctcagaaagaggaggtgggatttaagaattgttattctgtgcttttacaaaaaaaaacattttctatatgttccacataacctgctatctgaaatttcagcttaaatcttatctatcaactgtgttgggggactctgagaaatcaactcttgaggtcctgatattctccgccatcgctctgggattggtgtttgttggttcttgcaatgaagagattgctcaatctatcatatttgccttgatggagcgcagtgaggctgagctggcagaacccattatacgcctgcttcctgttgcgcttggtcttctgtatcttggaaagcaggtactttttgagcaaccttgaagcttagttccttttgattcattttttttgggctgtgtgcactagcatttgcttaaaaaaaatccagtattccctgcttttatacatttgaaatactgttcaatacctgtggattcgaggatttacctagtgtgtcctccctttattttattttaagcaagtgcttgtttctgttggttttgtcaagcgccttacctgctgtaaatgccatgtcatggttcccacatgatgtctgacctttcgcattgtaatgttgtccgtattgtttatatattgtatttctattcctaaatgtactgtatgcatatactatagctgcctttgtttctaactgttgtttatggctttatgcagcccttttagataaatgtaccttttatgattgtttggcaatttccatttcaggagagtgtagaggctacggcagaagtttctaaaacatttgatgagaagataagaaagtactgtgatgtaacacttatgtcactagcatatgctggaacaggaaatgtgctcaaggtacttcatgtttaatgcttagaggttcttgtggcttcaagcttgtttaaatttcgaggttttgatatgcttggcaattttacgcaggttcaaaagctccttgggatttgctcacagcatcttgagaaaggtgaaacccaccaggggccagctgtcctaggaattgcgcttattgcaatggctgaagaattaggagctgagatggctgtacggtcacttgagcgtcttttacagtatggcgagcagaatattagacgggcagttcctcttgctcttggcatactctgcatatctaatccgaaggtatgcaacatttgaccaacataagttttgttaaggatcacgatctaagttaaatttgaagtaatgctttgatgattaagtgtaaaaaaaactttgagagaggatgcagaatctaaactccagttcaatgaaagtgtgatcaattgttttatgtttgaaaagagtgttaaaaaaaggagttgtgctcaaattctcaattgacaccataacatttagtacattggaacaagtaatggagttattacttgaaagtgctaaactttgatgttccattattcaatatcttattccaagcaccttctttagctatttatttcagcgcttactgttctgtcaaattactcatattttgcaaggatattgtcatgcttattcggtattaagtgtttgtttgatggtccattctacatctatttggttgcataatttagcaaagcaatttatgccccactcagtgttgttgtatctacttacaattctattatcccatcccaggtaaatgttatggacacgcttagcagactgagtcatgatgcggatgctgatgtgtcaatggtttgtattcataactttttaacccacgacatacccaatatattttgtcctaattgatggcttacgttttatacctgaattaaatttctctaggctgcaatcatttcattgggtttcattggtgctggtacaaacaatgctagaatagctggtatgcttcgcaatctttcaagttactattacaaagaagctgcgcatctgttttgtgtaagttaataaatccacaatgatccttttaaacctgtgctccattctgttgtacctggttgtatataatgcgtacatatattgacaaaattttgcatgtattcaggtaagaattgctcaaggacttgttcaccttgggaagggtttgttgactctctctccataccattctgaccggtttctactttccccgtgagtatagctagtgctatttacatctactgtttattgcattcaatattaatccttcaattttttgtttgggtgtagaatggcccttggaggccttgttactgtattgcatgcttgcctcgatatgaaatccaccattctagggaaataccactacattctttacattatcgtcttggcgatgcaggtatggtccatttagttaattgacagttttgttgctagtgcaaactactatttggtactaaaattgagttctcttcttgtatgtacagcctagaatgcttttaacggtggatgaggatctaaagcccctatctgttccagtacgggttgggcaagctgttgatgtggttggtcaggctggaaggcccaagacaattactggtttccaaacacattcgacacccgtattgcttgcagcaggggaacgggctgaattagcaaccgaaaagtaataagagctcaattaacaatatgccatttctacaagtttccccatgaaacctaaaacctgatccgttgttttacgttttgcagatacattccgctgacttcggtattggagggctttgtaattctgaagaagaacccggaatataacgaggagtgagggacatttccaggcttgatacaatgctgatttctggggctcacaggcgtggcatactagggaaccatgctgcaacatgggacaggatctttgcctattgggttccctcctcggcgcctcctggtgttaatcggataggtcttttatctcttctaccggagtctcgagtgttggagcagagctctttgaattctgaaatcctttttggttgtgcaatgactgacgtgacgtatcacttgtacccaaacatgggcatctaggagttgaactgtttccttttacctccagtttatttatctgtatgtagcaaagtatgtactggaaatttgaggtcgaagtattattcttgatttccacaagatctcatcaaggaagctgacatattggtttcatgcttatctgttatggcagctgccatttgttttgttgtcactagtattagtttttggcacttagaccgccatctgatcagatgataagtatttcaggttataaatgtttatttttcaggtccttaacaatagaattgcatccttgaaatcattcgtctctactaacagagtttacatagctatgcaatgcatagttttaaaactaaaaaactaaccgatgaatagttttaaaactaaaaaattaaccgatgaatatgtatgttttaaaactaaccgatgaatatgtatgtttatgtatcctgcataagagcaggattaatgaaataagggtttttattaggatagcactgagagcaaagtataatagtatagccaactataatatagtatcgattcatacaatagttatctataaatatatattacacttaatatatagtctcatctgtcatacatacattgtattttacttatatataaatatatactacactattaatatataaacccacttgttgtacatacattatgttctagagtccgtgttgcatctgacaataaatttatagcctgccactcctcttttatcttctcgactgcgtgcacgttttttaaactactaaacgatgtgtgctttgcaaaaattttctatataaaagttgttttaaaaaattatattaatatatttttcaataaataaataaatactaaacgatgtgtgctttgcaaaaattttctatataaaagttgttttaaaaattatattaatatatttttcaataaataaataaatactccctccatccctaaatgtttgacgtcgttgacttttttaaacatgtttgaccgttcatcttattcaaaaaatttaagtaattattaattattttcatatcatttgattcattgttaaataaacttttatgtatatatagttttatatatttcacaaaagtttttaaataaaataaaggatcaaacatgtttaaaaaagtcaacggcgtacatttagaaaagaagggaatacttaattaattactagtatgtgctaatgaatcactctctgtgctgaggaaacgagtttccaacacaaggaaacgaacgcactcgagtctactagtactactcgttagagtggataatcaggggtgtagtcttggccgaagttataacggcgcgacttgtgcttgacgacgcggagcttcccgccacggccgcgtaccacctccacgccggtgagcatggcgaaatttatttcacccctttctctgcgatcaacactgaacatcttggcgacgcacagcttgccgccgcccaggtggacgacctgcgatgcgtacacctccaactccctcctcctccggtcgtcgctgtggctctccaccgagaaccccttcacctggaggctcgccaccggcggctgcggctgctggaacgcggaggacagattccacgctccgagaatggtgccatccatgtcggagatgccgaaccagaggccgtgctcggggacgtgctcggcgcggccgcggaagggcagctcccagtcgccggccttgctccacgcggagctcgcggtgtcgaaggagtaggtgccgttggtcgtggtggatatcaggatgtgcgtgccgccgtcgccgtaggtcattgtaggtcgtggtggatatcaacacccgcttcttagcatgcagttaagccatggatatagaatcagcaactggtcgcaggcaacgtataggagggacgggtactgtcatagaactgaacctggatctaagtatttgatcgttcaaacgcacaggatatatcaccagtatttccctaggacactcccagctatgatgtggggaatggtggctctacgtcagcacaaggtgatagattttgacaggttattcaaatgaggggaacggctagccaggtaaaggtcagcagttcattcccctttcattatagtaggtcattgtgctctctgatctcctgtagtacatgaaacaagattttactaactgaaataccttttgctttgcttggtataggtatatcttgggagacaattgcatagcttctcgatgaaccaccctgttcctgttgctttgacagggacaacgtacagttgatgttcggttcacactcaacagtcctgttcctgttttctttgacaaggacaaagtacgggttgatgttccgttgacacagtagtcaattcgcagtatctgtactgcaggcatacaaattcgatgtcaaagccccatgctctgtggttacattgcctttgttagtacatctaccactgttcattttactaactgctagtaaaaacatctaatggtatcagattgtcagttttggaagaatgattacacagaattaagtttggtgttttgtttggtttatagccttagttaaaatatttctgtaagccaaatacgagcgttgcaaaatttgtgacgaagttaggtttgttgccaatttttcttggtaaaattgctttgagcattgtttaatttgagatcaattagagactaaacaatgtacactaccatttcattttctgttggcaacaaaccaaatgtgtttgccaaattgcattacccttgcaaaagaattgataagattcatatttgtgcatcaatccaaacaattactggatcaattcaacctcaagtttttttccctgcctttattcttcgggtcactctccggcccggtgcctctatcttagtcaggctttaggaaaactagataatgggtttgtcgatgcagcatgcatcgttaaacaacattgactcccatgatctgcacctgtggcgaaaacaagaccaaagaggcaaagattgtcgcatcaaatgcaaatttagagactttttctcccttcgttctaacatggtgagtcattcgcttgatctgaaaatatagcatagagcaaatctggttgaatgcaaatgtccacatgccatgggcacagttagctgacaagaagtgcctggcagacagtagataattacatgccattttcacatccatattcacaaagataatgcactggcaacagtatacactagactgcaagatgaactatacttcccataatcattttccatcatagtaagtaactacagacatagctgttacttgaacaatgacacaaatatgatacaatacacaaggataagaagagccttatagtgtctacgttgtttgacagaaacgtgaatgtgtaaatgaaatttgaaagaacattgtttgagtaattcagctgtcagacacgtaaaagttaacaacatccaatgatatggaagggcacgtactgcttgtatcagcacattctttagagagacctaccaaacctaatcaacaaatcaggaaacttcagattagaaaaattaaggtcgaaaagaagcatatgtgcaatgattggcatgatcacaacatcacactgcctatcagaactttataaatgacaatctccaactatgtagatttatttttctgcttgtgtgccttagatacaatagtttcagttatacacggtgtccatatcacagtccaacatcacgaaatgaccaattgaaaaggatatgtagtatctaattacaataccatgctgacaccaataggttcaaacatgaactgaaacgtcatattgatatgcatacttaatataaaaatttaacctctcctcaaaaaaatatatatataaatttaaccttattcctaacaatgttttgtgacttcaacaataaactgaggacttgagatggagatgaaaagacaaggaatcattatagactcacaggagatagtaccaggcaatattggcatgttgtacttggatctaacgcaatgtaactgaattatgaggaaagaattatgcagaggcattcattgaaataatgcatgtgatatactcattgaaaagtatattagagtaggatgcacagctaaacttgtaagttacaatggagcaaaagaaaacaaaccccaccttcaaagagccttgctaagatccatagtgtttcccaaagttatctagtatataacctttcttgaagttcactgactaactgtccttaaagaaaagactacattgatcaaggatttgtgccagacaaatttcagtatgactttcttcaagttataagtacatcgacaacagtgactaaatgttttggagtgccataatcaatagagagaaaaaaaaataattcactagagactattttcattttagtaccaatatgatttttgttaagggggtggagtgtatgttaacagtttttttgcccaatgatgatttaagcattgtgtttttctcatcgtcaatactacatgcatttatgcagcctgttaaaggaatgaaaattatagagagacgagctaacccgcatggccacatatgcatcatcaaggaagctgacatattgctttcaggcttatctgttatggcagctgccatttgttgtcactagtattagtttttggcacttagactgctatctgatcagatgataagtatttcaggttataaatgtttttttttcaggtccttaacaatagaattgcttccttgaaatcattcatctctactaacagagtttacagagctatgcaatgcagagttttaaaactaaccgatgaatatgtatcctgcataagagtaggattaatcaaataagggtttttattaggacagtactaagtaggagtactctactagttagagtagataatcaggggtgtagtcttcgccgaagttataacggcacgacttgtgcttgacgatgcggagctttccgccacggcagcgtaccacctccacgccagtgagcatagcgaaatttattttacccctttctctgcgattaacactgaacatcttggcgacgcacagcttgccgccgcccaggtggacgacttgcgatgtgtacacctccaactccctcctccggtcgtcgctgtggctctccacggagaaccccttcaactggaggctcgccaccggcggctgcggctgctggatcgtggaggacagattccacgcgccgagaatggtgtgatccatgtcggagatgccgaaccagaggccgtgctcggggacgtgctcggcttggccgcggaagggcagctcccagtcgccggccttgctccacgcggagctcgcggtgtcgaaggagtaggtgccgttggtcgtggtggataccaggatgcgcgtgccgccgtcgccgtcgccggccaccgcgtacccgcagatcatgccgcgggaggagccttcgaagccggcggcgtaggcgttcacgcacggggacggcggcggcggcggcggcggcaggggttgccagaggtagttgtcccctacctcccacttgtcggagtcggactcggcgggattatcctcgaggcgtacgagcgcctcgaagcagccggcgccgtcggggaggggcgtcgtctccatgacgtacaggtcgtcgccgacggcggccgagacgggcatgagcttgggcgccgcgagggcgggcagcgtgcggacggcgcgcgcggcggggtcgtagaggacggcgcggccggtgtggtcgatgccgacgatgctgccgtcgttcctgcgcatgaactccatgcccatggccgtcgccgtggtgcccggggagcagaaggccatggcgggtggaggcaggcgagcgtcctccacctccaccgtcgctcgctccggtttcgttgctagtggatggccatcggggtagaagagatgtgatgggttgactcgccgtagcctgtgggagagggaggggcctgtaaagcagtggtcagcaatgtacaagaatcgccggatcatcctcttccctgctgccaatggcggccgccggcggcgatggcgacggcgacggcggcggcggcgacgatggggatcttggctaggtttccacccgtacaagggcgtgaacgattaggaaaggtatactcatagattacttactcgtgggccgtatcctaatccagcatcgcgtgtttggcccaccacactcgtgggccggcccggctggaacggggcctcgtagcaacagctctgacgcacgtgacctctctttctcctcgagcgcagctgcgcaggtcgacgacccgggctccgccgccgccgcctcgcctcgccgccggcgcgctcgctcgctcggctggtccgcgtagtgggctgccttccatagtcggctctggaggagttttgagggagggaggcgcaggcatgggcgaggaagaagaagaccccgactggctccgcgcgttccaggtaaccatctcttctcctccgcctcccgtggccgtgtgatgtgccctagctaaatcctgccaggtctccgtgggaataaggtccatcctgccgagcggtttcgatttacccatttttctctgtggatttaagttgagaattgaactgaattagtgggcgcgctaataagtttgatctatgtcatttcacaaaatggcattccgtgttgtgcttctaggctatgtgttaaatatgctttgtgatgttcgtgagaatttcgtgctctttgataatccttcgcacaactcgatgcgaattttcggtattcagaaaacgttgtttgtacatgtgtttaacaacttgtttacttggtctatgccaatggttttgctaaacggtcccgctatggtatcgccgattcctagtttaaacacaacgaacacatgtcttgattttggttccgatgtccgataggctccgatgtgaggcagcaagcatgttctgtatctagtacttgttacactttctgttcttggtacaacttctctggctttccaagattgtgacttgttattggtgataatatcaccaattttattttgcataatttttcgtagccaccaactacatcgacggtgatgctttcttcgggctccgatgattctcctgaaaacagtcctacaaggactacaccatctggagaagaacaaaagggggaaaacaaggctagttcagaccatgcaggggatggagatgctgctgcactaaataagggcaaaaaggcaacacctactaggaggaaaacccctactagtcaagaaggtatcattagtttactactccctccatcccaaaatataacaacatctagccttcataatttgccctaaaatataacttcttctccacatacattctcttcttagccaatcgcaactttccaccattcaaatcccttcctacctcctcttctcaatcaatcacaacattcctctatttaattccaccatctttcttaatgcctgtattcaaccctaaaactcatattttgggacggagatagtaatatttattattttgttatgacaaacttccaaactagtatctcctttttattcactttctgatctattttctcttcatggttgcctatagatgctttcgacaaagatgagaaaccaaccatggaatcaaatcaagataagcctccaaaacgctcggtaactactataattcttattttgttcttaattgtttaatccctgttcgtggtacctcgccatctggtttctaattagttatgctgctgatatgtgatatgcccatgtaaaaagaacaatttaaaagatctatagatagattacgagctatccaagttcgaatgaggttcagcagattccctttttttctcaagatgctttattcctgatgtaacaccctgaaaattcgaccgacgaaatctaaactctaaaaatacggaccttcaaaaactttttaaataaagttgcatcatgccgattttgttccattattttaatgaattttgatctcggagtttataaatcgcgaataatggaaaattagttaggagaaaaccctaaaaagtaaattgactaagtaaataattaaagagcaatttaaaataatatttagagaggatagaaatgagtaaaatattattgggactatatttgtatcaattaaattaaaaaatgtaggaataagaattaaatctaattaaattcaagaaaatgatataaaaataaaatatgggtaaaattaaccagggatggatccattggttgggataacacacatattgagtaaaatgcatatatgtaaaattaggaatttttagaatcaaatttatatggggaataaattaaaatcgggataaatgggaaaaatgggaaaagtcactattcattgcccgccaggtgctcgagtgcgtcccctatctctgcccctctgtcccgtcgccgtcgcgcccgcgcgccacgcgcccggcgccctagccggccttgcgccccgcgccgccgccgcccgccgcgtcgccgctgccgtgccgcgcgccgtcacgttgcctcgcaccccgagccgccgcgcgccgtcacttcgccgctgctgcgccgcgcaaccatctcgcgccccgcgcgtcgcgcgccgctctgccttccctctgccgccgccgctgcgccgcgcgccgtcgcgtcacccgtctcgagccccgcaccgccgcgcgtcgcgtcgccccgcctgtcacgccgctcgccgccccgagccccgtgccgtcgcatcgccgtcgccaccgcgtcgccgtcccatcgcgccgcgcaccgtctcgtcgccactaccgagccgtcgtcgtcgtcgcctcgcaccccgtgccgcgccgcttccccgagccccgtgccgccgctgataccgcgccgcgccgcccgttccatcgccgcgcgccgtcaccgtccggccgtcgcgtcgcctcgcgcctcgcgcctgcgcgccgctcgcccgttccatcaccgcgacgcgagcctgccgcctcgcgccccgcgccgctgccgtgagccgtcaccgcgcgtcgacgtcgccgcgcgcgtcccatcgtcgctccgagccgcgcgccgccgctgccgagccgttcccatcgccgtcccctcgcctctgccgcgccgcgccaatgtcgccatcgccatcgccgcgggtcgccgtcgccttgcgcctcgcgccccgcgtcgccgtcgcgtctcccttctccttttccccccttagctcttcccctcccctatataagcctcactatttccccctcttcccctccatctccacccctctcctctacccacactaccgcgccgccgcctccacgccgccgcgccgtcgcaccgccgccatcgtgccaccgcgccgccgccctcgtgctgtcgtgccgccgcgttcgtgcccccgtgccgccgccccagagtgccgcaccgtgcgccgtcgtcgccgccgccgccgccgccgtcgccgccgtcggtgagccgctgccccccctccctctttcttttgtcgccgagccgagagagaaagagagaagccgagggaggaaaaggagaggaaggaaggaggaagccgggaggaaggaaagaaaaagagaaaaggaagaaaagaaaagaaaagaggaaaagaaaagagaggagaggaaaaaggaaagaaaagaaaagagaagaaaagaaaagagagagagagagggaaaagaaaagggaaaaatttagggggaaatttaaaatacttacaaatattagaatttaattgtaggattaatgaaaatatagttagatgaaatcttactaattaaatacctaaaatactagcatttaaatataggattaatgaaaatataattggatgaattcatatagattatagataatttctagtactctccataagaaatcaattcgcggtattaatttagatgtaattaataattaaacaaatgtatgaattctcgtaaattattgtggattatttctgggtaatctctataaataatcgattaacggtagcaattcggatttaatcactaggatgttagccgtgtattatatttaatcatagactaaattaagtcgtataatattctgggatttcgtccgatgtttagctcgcgatagaaatttctaacctattaattgatatgttactcgggtaggttaagttaaaaactcatgaccacaaaatatttatactcgcaaaatagtttaaatcgaaattgggttggccgtagtccgcggatagtgaagttaacaaaagggaatcgactttcgcatgcgacttttatttggattcatttggatttttatttgaattctaaccgaattcaaatcaattcttgcacgtaactatagagcccgagggagttgcagatccaagcgaaggccaagacccgcaagactttgagcaaggcaagtcatcactattctttgaacatgttgatcccaattgcgaaatggttttgtttataaataaaattgcatgcaatgatgaacaccctacttgtgattatgccatgccttgattattgtttacccttgaatccttgtaaccatgtttacgtatgagtccctagtcaactatgacaattgcttagaaatgctattctagaatcatgcatactcatatttatcaaatgctatatgcttgggcaattacctttgggaaggtaattgagatgcggcatgtggagacatgagcgccacattgccatgatgttgatgacatgatttgtgaaaggagaaataaaattaaacaactgttttcgactggggcggacggaggatttgggtggtatctggaaaaggctagtaccgtccccggtcaattaaggaccgagccatgaagttaagcatgaaacgacccccgtacaaccgtacttctcgaatgggtatagacctagcggattagatagccgagcggaggcagtacccctgcatagtggtttcttgatgtgtgaggcaggggctctacggtggggcagccattggtagaaccgcgaggcgggtgtctacagtggtgtcgccatcagtaggactgccttatgagaacctaaaacataattataacttaatgcatgtgtgagtcttcccttcccgggtgcgccagaactcctctcactgctagaaaccgtgtacgcctagagtgcatgaggatgaaaagttcatggagcgggtactgccaatgcgaggttatcgaaaagctttgccgtgacgcgtctcatgtgttgggacgaggctcatgtgttgagcagtcgcggagtgcgggtaaagtgtacatccactgcagtgtgagtaaaccaaatctattcgaatagccgtgctcgcggttattgagcaccgggacatgtattacacttggctagactctaaactcttaacttgtgtgggatgggatattgcatgatgatttttatgctgatggagccatttcctgagaggtggaaatatggacatcctcagaaaaccataacgactcaatggcgggaagctatccttgggatcacaatggatggtggacagaaccgtcattgtttaatatgaatactggtattaaaacttgatcagtctatgctaggtcttaggcttgcgaaaagaattacaaaacttgctttgtgcaaaagaaccatagccatcctttgaattcccctgtcatgtgcatcattgctgtggtggcttgctgagtacggttggtactcacccttgcaattataaaattaatcagaagcgggagatgaagccacggaagatccttatgcctactaccaggagggagacgaagatgatggcgtccagtaggtcttagtacggtcgttgcctgtggcaatggcatgccgctgcctaaaattccgctgccttatctaaactctgcttttggttgtattccagaccgctcggtctgatgatttaagacaatgcctgcgggcttatgttgtaataattcgtactagactctcgtgtatgagcattggtattccagttatgaaatcgtgtgtaccagactacttgatccagggaaatggtacagtttacacgagtgattcctgttataaaaacgggggtctacacctgatgtcaacaatactacttgaatcttatcttacaactgttctacattatttgttattgatcgtcagataatgctactgttatatttaatactgacttcattgtacatattacttagttgcaaacaccaggtccactcttttgttaattctatgcctaaattttttgtacagactccaaagaagaagttggttaaacccccatctggttctaatgcttcaaaggttactggaccaaaagctggtccagatcaaatagatggtaagactaatgaaaagctttggttgccttttagtgaaaagtcagtttatgaattcttagtttcaatgattgataattatagtcatggtcatgcatagataccttggaacatcaagaagagggagttgctgaagaagacatgcaggataaacttacagagcactctgtaagatgcctcaacttccttctatttttaatctattttttcctccacactacggttccagaacattgagagcattgacccaaacaaggagcaaagaaaacaaaattagagcccacatcttactgggaatatcccaacatgtgtcatttttgttattgcattatattgaactaatgaaagttgggtaaatccttttaagaaggtataggaaaatatgaaaataaacatcattttgtaaatatttatcaagctccaaccgattagttctttccttgattaccgtaatttttgtagagcatgatggcgtgtcttgttattcctttaactagttacgtcaatatgtctgagatatcttatggactgtaagctcttatgcgttccaggtctcccagaggttgccattaatcattcctgataaaattcagcgttcaaaggtatgataattctaactggcattatcaattagaaaccattgttctcataaaagggtcagtgtgtcaaatcataagtccggaatgcaatgagcaactctgctatcaccccccccctttcccatattttcttcatggaaaaatatcggtcaacttaacattggtggaaagaaattgtacaattaatagaaataccgcagtgacagagccataaatgagaaatggttggggccctttttagtgcaccaggagttagaaggagtataggctatatatattaaagagccatagatccttgataatccaccaaaatgtgttatatgtgctaaaatgcagtaaaatcaacatcttgacctctgcaagtatcatctacctggaagactgggaatcatgactgacccaatcaatgatagtttccctaagtttataaattataatcctataatccttgttctgtttatttctaggcattgattgaatgcgatggtgactcgatagacttaagtggagacgttggagctgttgggaggataataatttcaaacagtcctaacggaaatcaggaattgttattggacctaaaaggtaccagcaagtcgatttctttagtatcatttatgtattatgcactttggtttctgactaggcagggtatttttaccaacaagggatttgaaattaatgtccgtgttatcttactacatgcactattcaaaatactttacccatattattattatttttacttatatacttacacaggaacaatatacaaatcaacaattgttccatccaggacattttgcgttgtaagttacattcaaacttaaagtacagttgtgcatttgccttatttgttagtattgatcttaaatccttgatggactgtctctttttctcaggtcagtgtaggacaaacagaagcgaaggttgtcgatgataacataaatctcttatgagtatttgacttctccataatttttagtttaggcagttctactttctagtatgtagcgtgctatttttgctactaaatccgattaaaatatattattctgatggatgtagctgcttaccttattcaaccatttttccccttttgcagatagagtctatcatggatgactttattcaattggaaccccaatccaatttatttgaagcagagactatgatggaaggttagcattcttctagatggtctaattagaaatcttcagcccatatatcctactgtttctgacctataaagctgagcagcaaactgcgcgccaataaaagcagcacatcttatctttctttaatggagctattaagcaatgcattgtcatttgacagtgtagtcaggaacagtcattctgcatgaagtgatgactaatgaccctatcatttgatatgatgataacatctgctgcaatggttattttctaatactccaggcatgttatctttataggtacccttgatggattcacatttgattctgacgaggagggtgacaagcttcctgaaccgcatgcttctcaaaacgatcaaaataatgaagatggggatcaacctaaggcaaaaaccaaaagaaaagctgagaaaccggcagtatgttctctcctacccttttaatgatcctataagcttcttttcagtttcttttctattaccattatgccatctcagaatttaaaactgatgatggcacatgttagcactgttgcaggaactaagttaataaggaacgtacccaaaatcacatctggagcaccttgagcttctgcagcagcaacatgattgacacgggcctttgatgctggtgcggtagagttgctctgggcagggacaatcttcacgcgtcggggcttcggacacttgtcagcgtaatgtcctgggtctccatagttgaagcacaccccgggcttgatgccttgctccttcttggcaggttgttgctgtgtcgaagctgcaacagggcgtggagcttgattgcggatgttgttgcccgcgttgttgttgaagaactgacgctgcggacgaacaacagacgaagaacctccctgtggcatggactggggtcctaaagtaagacgcggcctctgactattcccctgttgtgccttgaagtgagcaatccggcgtttcttccgctccatgcgatttgtcacgccctgaagttcccctcccttgctctaaattcataaaataaatcgttcgaagaaattgtttaatttaacctagagatgaatccctaattaataaatgcaaataataatcggaatcggcatgtggaattttcttggattctacatgtcaaaatatgctaacaggatttttagtggaattttcagagccttggaaataattttaatcaattaaaataagcaaagtgcaatattaaatccctggaaaaatcctttttcctttttatcttttcttttccctccttttttctttttcttgggcccggcccatttcctcccgcgccggcccgctcctccctcctactcctgaagttcacccggcctccttctccctctcgggcgctgacaggtggggcccacctgtcagccctttccctaacctccgaccgcccacgcccgcgccaaccgccgccgaaaccaccacccatcgccgcccgcctcccccgccttccgcgccccactccgcgccccgggccacgtcgcccacttcctcgcacgccccgccctccccgcgcccacgccccactcccgctcacccccgcgcccgcgagatggccaggattcgatttgaatcccgcctctctctctctcctcctccacctcctccactactccggcgaaattgcgccgttcccggccacgactcgccgcccccctcctatttaagcacgcccgcaccttcctctctctttttcctttctcggtcgagccctcccgagctctccatcgctcccgcgcctctcatcccgccctccgccgctcgccgccaagctccggccgcactccgccaccgctagagccgtcgccgcactgcgctgtcgacgccgccgggttcgcaagcttgtgcgccaccccgtccgccattgataacttgggtattaaaatgactagatgttggtttaggagatgcttagccatgcttagttcaactagtgcacaaaaggggatcacattaaagcatagactttgattattggcaatagctttggattagtgccaccgcaatggtgttggttaattaaaatacactacatggtgggctgtgggtgcatggttttgctagtcgtgcccatggcgactaaggaccggttcgcgggatgccctggaagaacttatcgtacttaccacaagccagcgtgggcaacggctgggcttgtagtgtagcttttctctagccgacgtacccaggcgagggtgggcgtgatggagttgggtcggccggggtgtccggttgatcggcttccggattcaccgcggcacgaaaggggggctgcccgttgcctgctggggacgggggcgaaccctaaggtgtggtgcgatcggttagagggggttatgcgaagggtcctgtcacggcctctttccggtatgtcgtggtggcatgtcggcgcacgggaacgtgtcgtggggctgtgtcttgtgggtacagttgtacacctctgatcagagtaaaactattcgaatagccgtgcccgcggttatgggcggtcgaccagattcaccgtgattagtttcaccctagttagcttttggaactggttagttcaggtggtggtttgggcctgttgcaacgtggtgtaacgttggacagtgattggttaatatggattaattactactactgttttactgctttcaactactgctttgaaatgccggctttatgcaaaagaacctttagcctcccttggatataccctgcatcataccccccctcttccggtatgacttgctgagtacagtgggtagtactcagtcttgctctcttttccccctcaccagagttgaagttcttctcagttggagatgtcttgaagaggttggtttcgtcgctgccgtcaagggttgcctgtggaatggaatcgcccgctgcaggagtcaagtcttcaggcttagctcgctttaccttttccgctgcatttgtaatcttttatatttttgtaagacgtgaatctgtatgtcaacaattgtcgtttgtgtaccctggctggtcctggacaggggtttaatacacattcagcttagaaattctggttcgtgaattcctgggcgtgacacgattgtacttgtcctcctggcgaatagccttatccactaacttctggaaatcatgataatccccagtcatgagtgggtaagaaagctcatcattaagtccttccaagaacctctcctggcgctcttcatcagtgcgcacatcttccggagcataacgagccagacgattgaactcgtgcagatactcggtgaccgtgcgagatccctaggtgagcgacctgaattccttcttcttgagagacaccactcccgatggtatatgcgtcttccggaaagcagcggggaattcaagccaagtgataggttcagcggtagtcctgttaaggcggaagtgatcccaccattcagaggcagggccatgcagctggtgtgatgcaaacgagaccttctcttgatcagtgcactgaagcaaatccaacttcttttctatggcatgcagccaatcaccagcttcaacaggattagtggtgctagagaaagtgggcggcctcacacgaagaaattctgctaacttgttctggggaggtgcatagttatttccctggttctgctggttctggagttgctgcatcatcatgttcataagctgtgcctgttgagccaggacttgggcaagtgtgggattctctccattgttgttgttattgttgatgttggggccattcccgtcgctgcgagtgagcaccatctggcatgggcaggagcacaagaagagaaaccggggaaaactacttaggacagagaattaatttaacttttattgatcttaagtgagtttcattattacaaaactgaagactctcacaccactaaactcaccaactacctaacactcgaaaacaaacaaacgcatgcacttacatcccaccactgatgtaaatcacatgcgagaaacacacaaccaaacttaaaacaagcaaactaacacaacgatctaagacaacggtttgacaaggcattctaggtcttccgggcatcggagttgattgaaggctcgttcggctcgtctccatcatcttgagtggctccccactcgatcttggaatgggtgcgcttggattcttctccttcatcatcacttacgttgacgaccggaggatccgctagggctggggtaacttctttctccaccacacggacctttggcgccaattggtagcgagggacaaatagagctctcttccttgcggtaagacgaatcctggccttctgcggtggtgcttctcccttcaatgcggctagttccttctccaaacgatccactttgtcctctagcttgcaaatcttaccacgattctggtcttcacgatcttgagccgctaacacagtcttcgcacgggtttcatccatagcccacagcatctcaaccaaatgccttgtggtagcatcattctcaattccctcagtctcaaggtagctgccatggtcacttccctgtggttggcgaggatggtagcgataaggtgtcggccaactgatcactgtagcgatcgcggagctctcctatggcgatccttgccacctcctgacatgcatggatgtagtttcctcctccagcttcgaacatcactgaggagatatcttcactattactgttcaaggtgactttgactcggcacttcttttcgtgacgatcgtgaggaatctgggcatacaaaggggcagtcccaaatcctatggcaaaggacatcgtacgcaactcctggacaaatccctcaacaccaaacaagtactcaggcttgtagcgcggcatctaaagacaagtgaaaggagggagttaagacatttatccaattaatagcacaagtttttggattaatttgaataaagttagaaaatcaaagtaaaaggtaagtaaataaagtaaaccaagcttgcaagataagttgaaacagttggaaacaaggtcacaaattttgtacttttgaacaacaggttccaaaagaaataaaagaaagttataaaatcaacatgctaaatttatttcattgcagcaagattaaataaaacaatattgtaaaacttttgctggtaaatgagccattagtacagtaatagatgtacagtactaataacactggaataaattttgaatgagaaccactaaaagagattatgaagtgcatgtgctattagtttggtttaattaaaagagaaggggaggagaacagttctacttttccaatatttttagagggcttctatgggtaaccatttggcataacctagggtcaaggggctctgataccaacttgtcacgcccggaatttctatccaaaattccaaatgcttacatgtgtgtgaaccctcgtacaggaatcagccgaggcacacaataacaaattgataatagagtacaattattactctaattaataagcgaataaaatgtcattacagaggtagatagttcctctcaatcaataaagatctaagcagcggaaagataagataaacggcgcagacgactccactccacaggcagcttgaccagggctacacctaatcctccacaccatcagcatcactgtagaactcttcctctgatgaatgattgcaaggtgagtatatgacatactcagcaagccacgcagcaaatatgcaagtgcacaaggataccaaagaatggcataatatagggctcatttgcaaaagcagcatttagcaaacatttgagaattataaaacagtagagtaattaatcaccaattttaatcaacactaaacagcacacccatgctgctcaggcccaaccatcctgaacaaccatacccggctgtacagatctatctccaaaccaggaatataccattccaaaccaggagctaatcaaattattaccagttatagcatcttttattatggtgagaagtgtgagactaatcacgaaagacattgttagacccgcccataaccgcgggcacggctattcgaatagttttactctggccagaggtgtaccactgtacccacaagacacagccccacaacatgtcaccatgtgcctcaataccaccacggtacctcggaaaggagctgtgacagtacccctcgcacaacacaatccaccacagcgcacctttcctggatcataatcacccccttataaacaaggcatggactccccagcgacccccgtgggcttatctccgccacttctcagtctggtgctccgcaatgaaccatgctatacaaaaggtaaagccgttgcccacgctggcttgtggttggcacggttaatgtttcacaaccgaaactcgtgaaccggtccttatttgtcatgagcacgactctcaaaaccatgtgctcacaacccaccattatcaagttttagttggcaagtaattaattaaccaatcacgattgaccatcgtgaactatcattaagccatcattaaataatagtgagtcataagttatcccaatagtgtgctaatgtttctaagcatggctaagcaatcttatctaatatctagctgaaccaatatatatagcccaactagtcaagttataataacccaaggtatcaaggaataaagtaatcaatgcaaacaggccataacaaaggaatagattcacactacccagtgacattcgaaaataaatgcacaattgaaataaatagagaatttaaatataggatcaacatgctcaaaggattgtgtttaggatctgtgtgacttgccttgctggccttggaactcttcaaattcttctcctgcgaaaacagactctccggaaacgtcggaatctaaacaaaaaggagcaaaatcaccaaacagcacataaacaagcatgaacagtacatgtggatatttttaacatgtagatctcaattttagaaaaatttagagacttgaaccaactaaatccgagctaagatgaattagttatgaatttttaaagattaaatcggattaaaacacttatatggattttaattgaattatgacgcaataatgaattatttttgaaaaggaaaagggaattattgcgtcagcggctagggttttcggtggaccgggtgcacggcggcggcttacggaaacgaatggccgagatctttccatccaaaacggacggccgagatcgaccggtccacggtcggaccacgagagacgacgacgacgacgtcggcggtgacgtcaccaccggcggcggctcgggcgtgcatgctcgccggcgaacgacggcacgacagcgcgaacggagggctcctacgggtagcggacggcacggcgaactcaccggtgaccaaagcgacggcggacgatgaccggacgacatcggcgacgaggagaaggcggcggcactcttcggcttgacgacggcgacggtgctccggcggttgacagcgacggcgaaggggcggacgaggacggcgacgcgacggcgaccacgatggcgacctccccgagcgacggcgacgactggagcgacggcggcgacgacggcggcgcgaggtctcacggggctagggcgctaccgacggcgagagacgaaggcgagggtggcagcaggtagcggtggacttgggggtccttttataggggcaaggaggctgcggcgaaggcccacggcgaccggcgacgcgaaggaaagtctagggttcagaggagagagattgatccgaatcgaactcgaatccgcgagttccaaaacgatttagacgatgtttccaaaagggaaaaggtagaggggatcccgaggatcatttcccctctattaatttcaccggaaacagaaaggggcggttggatttggaaggagacgacggcggcgcggcgctagggttcgggcggcggcagcggcgcgaggaagacgaagactgacaggtgggccccacctgtcagcggcagcgagcgcgcgcgcgcgagcgggcggctcggctgcggactgggccggcttgggccgaggaggagagagagagggttttgggccgactttcggcccaaagccaaaagagacttttaaaaacctttttcaatttaaattattcatgaaatgcaattccatttattaaaaatacttccttagctcaaataaattccagaaaaatctaggaattatagagttaagcaaagtatttaatgaaattttatctggccccattttatattggaatttattaattaaaactagatcttcttttcaaggctttttaaaataaattctaataattccaattaaacaacaatttatatatttaggatttttaaggtgtgacaggcttggatcatagaagttcatgttaagataattgaattcattttggcctatgcgttgtgacatttgattatcatagaagttataggacgatcgaagtccaaaaaatgaactacttagaataccatattgaggacacggattattttcatcagcttgatttgaaaaaaaaaagaactacttagaataccatattaaagactactgatgtgagaatctgcacatccattgtctaattgaacttctgactaaacttttgttcaattagacaattaggcaagaatcatctgactgaacttgacacggcaagtcggcaggtggaggtatcctgatagataaacagatcacataaacaactcaaacatcgcaaacctgccaatctcataataggagaacattaatttgcagctttgcttacttcgatttcattttttctcaggtcaagaacaaaatttacatcaatgcgcggttgcaatctgagtagttatcttttactccgtacagtgatgacgcaaaacttacaggagattagctactacaactaattacccttcgcatgtccatggaaataaggtagcatatatatatacattaattctgaaccaagtctccgtatttcaggctccttgcagcatatggctttactctcagcttgctattcttgcccaactgcttgtggagttgtggggtgaaacaggtatcaccacctgcagaagaagttctagttctgaaagacaacataccttccatgatacattgatgccttgttgcctccagataggctcagaagtctatcataccaaagatgctctctactgaaggattcactaaacaacctttcatattttcatctttatttcctaaacctaaactcaaccttttagtaatggacacaatttctcggtccaggaatacagagaatgcgaccaataagaggattttaaaaaaaaatttcgaagggctatacctatactgtactgcactagtcactagataagtcatggtaagaatagggcctcaaggtatagtttgatgtacaactggttgctcctatagacataggaggctatagaagacaaggggtatgaaagcgttgtcgagttgggctgtatatgcttccaataaaccgctcaatgtcacagctaccaaaagtgatatccaatgctgtgttaatataaaagagatggtcaggatttatgcttgcttagtgtattgtagaataaaagcttcaaatggtttaatgccaggggggaaagtaaaacctgtgaaagtatgtatccacttgaagctaagagtgacagcaggattgagcaggctgctaatacagaagttatgcctgctgctgtgcccttaattgttttctctaacatttcaaaagtatgtgcataagagatcaattatcaaccatggaataaataataatggaaatcaaactcacttcctgtcttgctccatcttaggacaccatacttataacctatcattgatgcctaggtaaaacaagagaattcatcatactgaacgcagctaacataagaaaatattaactgatcacacactggacatagaacctaccatggtatcaccaatacccaagctgagaattccagcaaatggtgtaagaggtcggtcattgaatcctgatgacatccatttaggaagtgcacatcccagcaagagtgagaaatgactgaacaaaacaaatatagtattaggcctatccaagtattgagcatgtaaatgagttaaaatctggaaaacaacgaccattcatccagacctacctaacaattagaatctccgaatcgcggtgatcagtgaaagcactcatgaactgatgcacaatatgcccaagagggtatatttcccaaacctgaggtcagggtgaaacatttcgttggagaaattagcacatgttggcatacaaactgccaaaaaacagagaaacgggagaaagaaagggatacaaataaagaaaatgcttactcgaaccatctccaatattaagaaaacagcaaatgctgcaccaaatgccaagtccaagaaatcaggctgcaaagagaaaaaatttattgggagtgtgtttcaaacaatctgatagggatcgaataacgaaaacatatattacctgaaatattactgcaggagagaaaattaggacagcaacgagatggtaatacttgcgcaaaagaatcctctccgttttgctttgttttgatatactgtagaaccttctaattgatacatatatcacaaatatccagtttgcgcataaagcaagccgttcacgtgaatcggtgaaaatatagttaaaaaccctgtgaaataataaaccattaagtgaaccaaaattcaatatgtacaaaaatgcacaaggtttagaagcaacacaggaaaaaaaaattcaatatttgactaacaaagtgcatgcttttatgcccttccaatgaaatgcaaacttatatgctcaccaaacaaatggatgcacttcaaaaccttgaataagacgcgtccatgatggcactaacaacaatagtgctatcaacaatgaaacataaaatacaccacagtcaattctcttctgtgtgcattcctcaactgtttgtgttctttgactctccagttttctacagtaagccaaaacttgaagggagcttttgtataacaaggggagaagaaaaagaccaagcaaaaccccctgcagaaaagaaaaaaaagggaagggtattatgcactaagaaactgaagccagacaacgcaatagcttctacctgaataactgtgcctatctcgtttcgagttccaggtgcgcgaataaatgcttctgatgatacggagaactccatctgccagcagcacggttgcaaatgtgcaggcaacaaaataagtatcagatttgctaccattttgctggtaaaacatagttcgaggaataaatcacacctttgaaagagtatgagccagcatatcaccacagtaaagaaacaagaccacttgagaccaaaatggcctcccctaagttcacagaaaatgtaaagataagttaaaaaaagcaatagcttcaagtcatgatgaaaaggagacatatacattgcatcggccaataggaaccacacaaattagctgaatttaaattttaaaaaatgaacagtgtagacataatgcaccatgcctgcatggaaactggtaggataactagcaatcgtatggatagctctaaagtctaaacatatgcagtctgatataaacaaaaaaaaaagaagatctacatcttagacttcaggtacaaaccaaaagatgaacatgaagggaacttctctagaatatgctggattaagatcacagcagccactccatgacacagcaaatacaccaaattactcatcaccagcagacctgttaagacaacctagattagtttgtaattccttgcttctgatgaacttccaccagattttggaaagaaagggtgagactatctttgcatgcagataaaatatgcatgtacctccatcagtcttcagtaaaaggtgaaacaagtatgccaggggatataaaatgatgagcaacaagccgtatttcgaagctatagaatttccattgctgggagactgccgtagatgccaaacaaaaaatgctaacatgctgaggcagctaacagatactgcccagtactgcatttcaaggtatgcatattctgacaatgaaccacatatgtagttagtaaaccagatgcgtcaccgaaaatcttagtgtcaaacaagatttgaaatgttgatgaagacttggggaaatttccatttagtaatggaactgataaatttgacaaaatagaaaaatggataccttcacgtccattaggatcggctagtaagaccctataaagttgaattaaccgtgaaagcatgacactaggcagagtagtggcaccaagaagtatgcctgatgaagcacccggcctggagcatatacatatatcatcatcaagcactgaacaatcttttacagaaacatgcacaagagcatcaagccaccacaagaaggtgaagtcctcacaacacaagacgtgacaaaatcttacagtaagcaactaggattgcacatcacagaacccatataaatgacagtgggagcaacgtttcagctgaaaatgcaatggaacagtattttggccatcaaaatgggagcaatattttgactggctttatgataaaagcacctctgaatttcccatttgtgaaatgggttaactaagaaatgctgaaacccaattattcaagagtgatatttgtcccttggattgttggaaccaccaatatctgaccccattttacacactactgaaccaaaataaaatccactaagcctcaagtacaagtaaaatcacattcctgcggtatgctgaatccgactgatgtcgtttccccaattgcatgatcctcacagggaggcagccagcattgaaccaacaaatggataaattcgcctcagattctacggctgcgccaacgaattttgcaaaaacactgcaccttgcaggttccctggcatcacagggagctcctctaagacttaattcgtggggggttcgaaactcgaacactggtatcaaagatcacgcaatcccccaagctaaccaaatcgcgcgaactagcagcccagctccgtggagatgcggcggaagaaaatacggataagaacgggggaggatataacgtcgcacctggtcctgaaccggcggagcggggatgaggacgcggaggcggaggcggaggcggaggcatccacggcgagctcgacggcgagggcggccgcggcaaggactgcgagcggggcggcgagctgggccggcgccgcgagcgcgacgcgggcgacgaagaggaacacgacgagcctctcgcccgagaccaccgccggcgccatcgccatcgccggcgaccgaggaagcgcacgaacgaagggagcgcggcgcgaaccggacgggccttggtggttctgactgacaggtggggcccgcataaaccagacgcgggtggtgggtcaaagcggttgagccgccgcgtccgacacgggtgtgggtgtggtgcaccgtgcacgcacgcgcaccggacctgacctggtcctcttgcgtggcgtcaagcgtgtgcgcgacgcggagagaaacagtggccgccgctgctactgctgtttttttttttcttcttcttcttctttttggttttgtgactcgctctcgtatatgtgggcgtttgcgtcgacgtcgtcgtctgggcgttgagttggatgggaatatggaatgattcctgagtattttgtaccaccgctccaggcaaaattcacaagtgccgcaatgttcaagcaaaattcatgttctatgctactccattcgtcccattataagttcagtcatgagtttccatatctatctttgatcatccatcttatttgattttttttatgattagtatttttatcattattagatgataaaacataagtagtactttatgcatggcttatatttttgaactttttttttaaaaaaaattcaaataagacggacgatcaaaattagacacgaaaaattatggttgcacctaaaaacttaaaatgggacagaggtagtatcaaatataagttcgacatccacaattcttgttctcagataggtaactagtgactgatgaggagcttgtctgatggaccacaaaccacaacatattctcaggttggatggggtagatacaggtacaatacaatttaaaatattttctagagtaacaactaacaatccgggaagaaaacagacaccaagataaaaccatccatccattgatccatctgagactcagagcagggtagtaatactaataccacgttccaaacatacataagtgacgttccaggcatagtaataacattactaatacagacgctaataataagacaagatcacaatctcgaccgtagcttataacagttttttgctaataatacagttattgggaatttgggacagcagtaatactatgtttgatcattttctcttcagagcggaggggatcatgcaacggcaacaaagtgtgacatgcaggacagatatcatctccttgggatctttaatctaagggaactcctcagcaaaccgggtcaaaataccctgaacacaaaaccagtaacaaaaacgtcagtacatcagaacaggtagcaatttatcattacattacacaagtaaaccagggggaaatatatcctaaacattgcacccccttcagaagcaacaagcctgcaaatacagaaaaaagaaatgcaacttcaatgaaaatgcttccatcacaagtaaacaccatatgaatatcagccaactcaaataccacctagttcaagcttcacacgcatatattggatgacggtacatggaaatgtacatcctgcctgccaatgcgttctcacatcagatgtgttctttgcatagagggaagaaaaaggcagaacataaagcaaatttgcagaaagaaacatgaaaggaaatacgaactagtgcctgcacactatggttcatatgataacaataaccaaagcgttggcgccactgaaaatgagcaaacagaacaaatcagctgttggtgcaacctagtccattcaatataggcagctcgtgatagatgttcactgaaaccaagtaaccaacaagaccatacaattctaacatatcaatgtaaagtgatttataaaaagctgcagctctatttttctgagttgtttcaagttacaattactccagcaggtcaaactgcctaaggcctaataacatacagtagcccaggctaaggatacccatttgtcaaggaacagtgctaactgataaaacacttgcaaggacagcagtaaaccaaaaggaatcatacatacgagtaatgcaatggttgctctttagaaaaagaaatcacctgaatgaacaaatgtgaacccatgatacaatatcacagcagaagtttcaataatatttgccgcgaaatttaagtaaaataataggaaagaaacaacacttacattgatcagacaaacatcgccagctctggacggctgtagatgttatccccatcatcatctagtgcaggataagcagcaacaagtgcatcttgtgcacctatatataatgagttgtagattttccaatatacttcacgtactttccttgctggatggaaaaggccttgaaggcagtaattcaagatcacagctggaccaagagcaactctcatcccctcaatcgcctccatgacagcattgatgacatggggagatgtctcaaatatgttgggccagacatagttaagcaaatggacaagagcatcctcacagcccaagccagcaacaccaagagccatgtgtttcacagcagaggcagcagtttgccggtgaacaagatctctgtccattagagcatcttcaagcaagggagtaacagcatatatgtaatccttgcccatctcaccaatatactcaaagaggaaagagagagacttcaggacaccattctgaacattgagttctgggacccggtactcattcatcagggcaggcagaactgtgaaaggcgagcaggtttcagcaacaattgcaatcgcgacagtcgtgcagacacggttttgtcgttcctgcaccttcaagttattcaacagagtcgccaacacatcctgtggcccaatagccttcgcaatataaccaaatgtgttcacagtcgctcttctaatacccttcttgtgagccttcaacatttcaagaagctcaaagcaaatcctcatccactccctagcaggcacaaattctgctccgcgatcagcaatcctaccaactagatcaatgcagttctcctggaccttctcatgcctattcttcaagataggagtcagccgaggaagaagatccttgattggcggtgtcatcttagtcataccaatgacattcacaatagctttcaatgctccaagaatcgaacccaacacctcagggtactcctctcccaaatactcatacagcacaacacccaaatgacccataagctgctcctcctgacattgtttcatcacaatagctatccttgagatcagatcagcagcttgctgcctaacttttgcactcttgttgttcaaccgccacttaatggtaccacaaatctgaggaaggtaaggcttgaccctctgtcccagtgcattgacaacagctccaaaaccattaagcatgacatttgcatcatcacttgtctgctcttggaaagcatacaggatgccatcaataagcagctcctccaaacgagcatcaatatctgaagcacccaaattagccaccaccttctcaattgtttccatcaccattctcctgtaaggctcactttcatctttcagatcctcaacaatcctcccaacaatatcagcaactccaaccttatttgccatctctacagttgtttccacaagctgcttatagttcctgcggtccagagccattctcctaacccagaagtgacggaaaaactcaggaaggatgtcattccggatataatcagcctctacaccctctgtactgacacactgtttaacaaccttcaggacaatcttcttcatttcttcatctggtgactggaactcccttatcaggatttgcatgacctccttcgtgtagtaactggcatacagcgcatccataagagggatgatgaaaccaatagctttcaagaaggcagcaagaacctttccacggtgagatctgatacccttccacagaggcttcaaaacagtatcaaaactttctataccatatggtgcagcagcctcagcaagtgtagcaagagaaagggcagtgattgtccgcactttctggttctcatcactaagaccatgctcaatgatctcgactagggacttgagatgtggcagaacagcgcagcccataagaatagcaatctgctgaacaatcttgataccagtgtgccgagcttgccaggacttcttactctgacagacagcctttaagaatggcaggagagcaggggtacccaaagcagaagccaccacgctaaatgctctagcagtggtatttctcacatactcatcaatgttatcaatatctggtctcatggcggcaatcatagtagcaagaccagcagctttgctaagatttgagataatctcccggccctcaacacgagcatagtagtcctcatcaatcagaagtggctcaatgaccacaagaatcttatggacaaacggacggactagctcatccagcttatacagtaccctgtcaatgaccttcaccagaagatgccgctcctggtcctcaattgttggctgcatgagcaagggtagaatcttgttgaacaaagggccagcaccaaattcccttgctttgtctgtcagctgtcgaagtgcgtataggctggtatgaagctggaggttcaagaatcttgtacccttcctgcgggaacatagtatcaagctcctcatccgtaagaggcctgttccgctcctcaatgtcccgctcccaccgcaagagctggtactgctctggagtcattggaccacgagaagcaatctggccgggtgttggcgtcgcaaggttgtcaccaccaaatggcgtcggaccaggagtgtaacctgcaggcgtcgcagcaccagtgcctccaggtgtagcactacccatacttgcaggagtctcatcccatctcgatctctgcttcttgggtgttggcgtgacaagcccaccaggcagcttaggagtagcatcccaagctccagaaggtgtggcacctggagtaatgccaccagctgcaggtgttgcatccgcatcggccatcctcccaggagttggggtctcatcccaccgattccttctcaccgacggcgtcgcatccccgacacgaccaggggtggcatcccagcgcccaatcccaggagttgcatcaggagcatcccagtcggaggaggtcttcgccttcttggatccaacagcagcagaagcatcaccatcctgcgactgatcccatctattgcggcgcttcggcgctgccactggctgctgctcaggcacggccttcttctccttggccttctcctcctcttccttttttcttctgagctatatcacgcagcagctgctccttctgcttctgcaggtcattctcgcgcatggcatcagcatatgtccgcacggaagggtccggggtggcctcaccagcggcgaagggatcatggcgctccggcgagatgatgcgggccagccgccgccggcgatagtcatcctcgcggtcgatgatgcgctgcgacttcttggggaggccgtcgtcctcggcggcgcgggggatgtcgggggcggcgacggcgtggccggtgtaggaggcgaggcggcgggcggcggggttgacggccgcctcggattcgtcctcgggcgcgtcgtcctcggaggcggggatggaggtgtcgtagccggcgaagcggttggggtcggagccgccgccgccgtagagatcagtgtcgaaggtgacggaggagacggccatgggcgcgccggcggccagggcctcctccatcttcttgcgctcctcctgcgcccgcgcaagctccgcgtcgatgccgtccatggcgccggcgcggcgggagaagcggttagggtttcgggggtggagagattagacctggatttttcacattttggtccttttaaaaaacttatttcgcaagtagacccctagaaaaacttatcccaaaaatggtcctttttggggcgccagagtggctggcgccgtcgttcaacaggacggcgccagcctctttggcgccgtccccctgccgacgtggcggggcgatgctgaggtggctagggggagtgcgccagagtggctggcgccccccccccccccccgaaattttttatttttgttttatttgtttgatatttttttttcacgcttagggacacacaagaaccaaccatagaaaaattgaactcaaatggacgtaatatgtgacatgtagaatttttcctctcctctcctctctccgaactagtacagaggagagagatgtgcaacttttttatttttattttatttttttgatatgttcttcacacttaggaactcacaggaaccaaccatgtaaaaaataaactcaaacggacgaaatatgtggcatgtggaattttccaaagctccaccgaaaaacttctctcctcgaaaacacaatcttgcaagcggaatttggaggttttaatatcgacgaacccgacaaagcgggggagaatcggatgtaactttttctgtagatgtccgtgcatatattatttgcctgattccgagtccgtatgagaaagttacgcctattttaatagatgacatattttgtccgtttcggtagagttttggaaaattctacatgtcacatattttgtccgtttgagtttattttttatacggttggttcctatgttctcgtaagtgtgaaaaaaatatcaaaaaaaatgaaataaaaataaaaaaattacatctctatgtactatttaacttatatatgtcatttcatgtggttatattttgaattagattaagtaatttcatatagtggtagagtgcattatgtttaacatgctgatcaaagagttttactaaaagagttatggtctaattttagtgaaggtgcaaagtagactaagtggtatgctagatattttcagacttagctaagtggtagttcgagtttaaattttttttgtggttggttgtatcgtgattctgagtgtgaaaaaacatcaaaaaactccatacagagaaacaggaatagaggcggcggcgccagccatgctggcgccctcctccctggggcggcgccagcatggctggcgccctcctcctgccacgtcggttcgcgtgcgccacggtggcaggaggacggcgccagagaggctggcgccgtcccgttggatgacggcgccagccactctggcgccccaaaaaggaccatttctgggataagttttttcaggggtctatttgcgaaataagtttttcaaaaggaccaaaatgtgaaaaatccaggagattagacgagggcacgatgcgagaatggggaagaagagcaagtcgtgaggtttgggctctcgtgctagatagactcgctgacgtcatctttcatctgggccgttgattggctcccgcatgattgaggccgtccatctgaaaaacatgaaccgactttgcttccgttaattgatatagtactactcaaataattactctcgaatgcaactaagaccaatccaaaatcgtaaagctaatggatgcagatggacagaagtctagtgcctaatccattttctctaaggaaactgtcatgttcgattattctcacaacccaaaaaggtaaatgttctttccagctgagcttattagaacatcaggtgcacgtatatcaagcagctaaaacggcatcatcttttataaaactccctatataagtttattgaaaacccaaacaatgtttttagaaaaaaaaagagttatacttaattaatcacactctccgattaaacggttcataagactacattcatttcggtgagtgggtggcgcataataaattgtgtattaattattatagtttttaaccttttaaaataaaacactgtttaagagttgagaagcgtgctagaggaaaacggataagtgatacatagtaatttttaactcgatctaaggcgtccgaaagagaaattgcggttgatgttaacctgtgcactattcgaagagcttctaatcactacaatttcaatccccttcaatttccctctcttgggattaagcgaacaaggtctcaatcatcttcaatcccctctaaaccgaacaagaacttaagcggatgttcccttagatatctaaaaaccattcaaatagttatgattttctttaaaaaaaataacattaacatttctttctcaacatatagtttgaatttgaacttatttttttcagtgttagttgtcactgaaccctacattgtcattttcttttcaatcttttctgaaactatttgcattgaatttggaaagagaaaaattgcaggggagccaaccccttgagagtttagaattcacttccaacaactccagcaaatctaacaagtttgcttaaacaaggatgcatgaagaaaagaaaacaaagaactgaataagtcagtgtaatcgaatgatctgaacctcgataagtcagtgtagtctaggcggtgacgactccaccaactcccctcaaaacaccccgtccccaacaaaaagttggaaacacgcccagaattgtttcatcaacaccgcaaaatgcgggtgctcgtcgtgaagggccgcgccgtggtggcggagaccatcggttgctgctgccgcaccgccgccgccgctgccgccgccggcgagacagcgcactttctcttcaccgccgagggcatccatcaccgtagcttctcttccacccctccccctccgccgcgtcctcacgtcgtcgggtcgtcgtcgtcgtcgtcgtcgtcgtcactttgggccggcgatcacagcgacaggtacggctccttctcatcacatcaccgttccttccgcaatccgcaccccgtgtttccgagtgttctgaaataacagtgcgcttcaggtggcatggaatcggcggcgaggtgcagaggaaacgcgagtacgagggccacgttggcggcggaggcgccatggcgactccccgattcaaggaggaagacctggggctgcgcgtgatctcgcttggcaaatgcagccgccacctcgttcacgcgcccaggtccgcctggttcatgctccacgcgccgtcgaggcgaagcttctcgacctcggcgtcctcctcgccgtgcacttcgccacccgcgccgcctgagaccagtccgccgaacacttcgacacccgcgccgcctgctccagatgtgccagagaacagttcgccgccggattatgatctctgctcagacaggttcgcgcaccaatccaccattgtttgtttggctgcgtgagattgcattgtgtgtgattactgcaactgtcaatttggatgtgagattgcattattaattattttgtgcgattacttgaattgttagtttagctgtgtgagatttcattattaattattgtgtgctattactgcaattattagtttgtctgtgtgagattgcattgtgtgtgattactgcaactgttagtttgctgtgagattgcattattaactattttgtgcgattacttgaattgttagtttagctgtgtgagatttcattattaattattgtgtgctattactgcacttgttagtttggatgtgtgagattgcattattgatcactgtgtgcaattactacatattgcaggtgctccttaggtgatatgcttgaagcgtcctatgatcctgtagagttcgtgcgcaactttccagcagtaatgttcagcaagccgaagaacgcccctgacactttgtacgatagatgggttttcaaaggctggttccaatctgctataagagacattttgagcaaactagaggatcatcacatagccggtctggagtttgaagatattaatactgagaccatgacaatagcttgcaatattgattcaagcgagttctatcccaggttcaattttcatgggaagaccaggaacattacttttgaaggacagaaaagaaattacactcagcttggcagcacccttgagaaattgatagccatctcagcaagtgctagtaatgtccatgcatatcatcatcaactcttgactgaagacgctaaagacttgctgaacaaaatgaggcatccttcccttgatcgttttgaggcatacatgctcagaaaccacccatctttacttcagatcgaagcgcatgcctctttctaccttacctgctttgatcacctgaagctattgcctcaaaagcctgttgaaaacttcttcaaaggactgccatacgcggtaggagaccagcatggcgattggattgcaattgcacatcaacacccgcttcttagcatgcagttaagccatggatatagaatcagcaactggtcgcaggcaacgtataggagggacgggtactgtcatagaactgaacctggatctaagtattcgatcgttcaaacgcacaggatatatcaccagtatttccctaggacactcccagctatgatgtggggaatggtggctctacgtcagcacaaggtgatagattttgacaggttattcaaatgaggggaacggctagccaggtaaaggtcagcagttcattcccctttcattatagtaggtcattgtgctctctgatctcctgtagtacatgaaacaagattttactaactgaaataccttttgctttgcttggtataggtatatcttgggagacaattgcatagcttctcgatgaaccaccctgttcctgttgctttgacagggacaacgtacagttgatgttcggttcacactcaacagtcctgttcctgttttctttgacaaggacaaagtacgggttgatgttccgttgacacagtagtcaattcgcagtatctgtactgcaggcatacaaattcgatgtcaaagccccatgctctgtggttacattgcctttgttagtacatctaccactgttcattttactaactgctagtaaaaacatctaatggtatcagattgtcagttttggaagaatgattacacagaattaagtttggtgttttgtttggtttatagccttagttaaaatatttctgtaagccaaatacgagcgttgcaaaatttgtgacgaagttaggtttgttgccaatttttcttggtaaaattgctttgagcattgtttaatttgagatcaattagagactaaacaatgtacactaccatttcattttctgttggcaacaaaccaaatgtgtttgccaaattgccagtggcgggcccagctttttaaacttgggtattcgaaatgggaaggggtaaaaaaatgtccatacaccaaaaagccaaaaaataggcttgtatattatgatacactaataattataatttagagcgtatagaataaaattgatcattagttcacacagtgatagaattgatcatcactagaaattgtttaacttatagaaatactaataccaaacatatcaaagtgtcaaaatatggaatacaaaaatgatagagaataataagttaggaagaaaacttacaatttagatattaacttttcgacgcttgatattttggaaataattgatgatgtccttgtccttagcttgcaaaaagaattctctttcaatgaatgtaaccaaacaatcattcaaatactacaaatttgctaatatggtatgaactatgaactactgtccagtgtccaatatactcaattactcaaatactcaaataggcaactagtcaactacaatcctacaaactaaatgtctaaatcaagcaagcaagcaactacactaaaatactaaatgtctaaatcaatgaatttttgtgcttgtcccgttgtccggagtttagtcactcactgtgctaatgtgcttatccggaatttgcaggtcaggcagtcgccggcgagcaggatgccgcacggccgcagcggcagcgcgcagccgccggctgcctcgggcctcggcgcggaacggcggacgccgacctgcaggctgcagctgtgcagcgcctgctcctgctcggctgacggcctggagcagcctcctgcctggctgcctcctgggcccctgcaggctgccgcgccggctgccgcacgcggcacgccgtcgcccgtcggtcacggtgcgcctgccggtcacgggcttggcgccttggccttggcggctcaccgcctcaccggtcgccgtcgccgccgccgcgccggcgccgcgcccgcgccgttgcacgccgcgaccgcgccacacgccgccacggctcccgccgccggccgccgcacgctgcacgcagcccccgccggccgccacacgtcacgccgccgcacgcctcctcccgtcgccgtgctgtactgctgtgttgtggtctagggtttgcaggtttgggtggccaaggcgccaggcgggtggggaattgggggaaaattgcaaatgggctgagatgtggcccaattagaccacaggtagagaggaaagagggaggggagtggaaaatttaggcccaatagagaagaaatggggaaacaaggcccaatataagcagtttaagttttctttttatttttttaatacctatatgaactatatagtatatatacctattttttttccaaaaatcttgggtatacatttgaatacccatgaatacatagtgggcccgcccctgcaaattgcattacccttgcaaaagaattgataagattcatatttgtgcatcaatccaaacaattactggatcaattcaacctcaagtttttttccctgcctttattcttcgggtcactctccggcccggtgcctctatcttagtcaggctttaggaaaactagataatgggtttgtcgatgcagcatgcatcgttaaacaacattgactcccatgatctgcacctgtggcgaaaacaagaccaaagaggcaaagattgtcgcatcaaatgcaaatttagagactttttctcccttcgttctaacatggtgagtcattcgcttgatctgaaaatatagcatagagcaaatctggttgagtgcaaatgtccacatgccatgggcacagttagctgacaagaagtgcctggcagacagtagataattacatgccattttcacatccatattcacaaagataatgcactggcaacagtatacactagactgcaagatgaactatacttcccataatcattttccatcatagtaagtaactacagacagctgttacttgaacaatgacacaaatatgatacaatacacaaggataagaagagccttatagtgtctacgttgtttgacagaaacgtgaatgtgtaaatgaaatttgaaagaacattgtttgagtaattcagctgtcagacacgtaaaagttaacaacatccaatgatatggaagggcacgtactgcttgtatcagcacattctttagagagacctaccaaacctaatcaacaaatcaggaaacttcagattagaaaaattaaggtcgaaaagaagcatatgtgcaatgattggcatgatcacaacatcacactgcctatcagaactttataaatgacaatctccaactatgtagatttatttttctgcttgtgtgccttagatacaatagtttcagttatacacggtgtccatatcacagtccaacatcacgaaatgaccaattgaaaaggatatgtagtatctaattacaataccatgctgacaccaataggttcaaacatgaactgaaacgtcatattgatatgcatacttaatataaaaatttaacctctcctcaaaaaaatatatatataaatttaaccttattcctaacaatgttttgtgacttcaacaataaactgaggacttgagatggagatgaaaagacaaggaatcattatagactcacaggagatagtaccaggcaatattggcatgttgtacttggatctaacgcaatgtaactgaattatgaggaaagaattatgcagaggcattcattgaaataatgcatgtgatatactcattgaaaagtatattagagtaggatgcacagctaaacttgtaagttacaatggagcaaaagaaaacaaaccccaccttcaaagagccttgctaagatccatagtgtttcccaaagttatctagtatataacctttcttgaagttcactgactaactgtccttaaagaaaagactacattgatcaaggatttatgccagacaaatttcagtatgactttcttcaagttataagtacatcgacaacagtgactaaatgttttggagtgccataatcaatagagagaaaaaaaaataattcactagagactattttcattttagtaccaatatgatttttgttaagggggtggagtgtatgttaacagtttttttgcccaatgatgatttaagcattgtgtttttctcatcgtcaatactacatgcatttatgcagcctgttaaaggaatgaaaattatagagagacgagctaacccgcatggccacatatgcatcaaggaagctgacatattgctttcaggcttatctgttatggcagctgccatttgttgtcactagtattagtttttggcacttagactgctatctgatcagatgataagtatttcaggttataaatgtttttttttcaggtccttaacaatagaattgcttccttgaaatcattcatctctactaacagagtttacagagctatgcaatgcagagttttaaaactaaccgatgaatatgtatcctgcataagagcaggattaatcaaataagggtttttattaggacagtactaagtaggagtactctactcgttagagtagataaacaggggtgtagtcttggccgaagttataacggcgcgacttgtgcttgacgacgcggagcttcccgccacggccgcgtaccacctccacgccggtgagcatggcgaaatttatttcacccctttctctgcgatcaacactgaacatcttggcgacgcacagcttgccgccgcccaggtggacgacctgcgatgcgtacacctccaactccctcctcctccggtcgtcgctgtggctctccaccgagaaccccttcacctggaggctcgccaccggcggctgcggctgctggaacgcggaggacagattccacgctccgagaatggtgccatccatgtcggagatgccgaaccagaggccgtgctcggggacgtgctcggcgcggccgcggaagggcagctcccagtcgccggccttgctccacgcggagctcgcggtgtcgaaggagtaggtgccgttggtcgtggtggataccaggatgcgcgtgccgccgtcgccgtcgccggccaccgcgtacccgcagatcatgccgcgggaggagccttcgaagccggcggcgtaggcgttcacgcacggggacggcggcggcggcggcggcggcaggggttgccagaggtagttgtcccctacctcccacttgtcggagtcggactcggcgggattatcctcgaggcgtacgagcgcctcgaagcagccggcgccgtcggggaggggcgtcgtctccatgacgtacaggtcgtcgccgacggcggccgagacgggcatgagcttgggcgccgcgagggcgggcagcgtgcggacggcgcgcgcggcggggtcgtagaggacggcgcggccggtgtggtcgatgccgacgatgctgccgtcgttcctgcgcatgaactccatgcccatggccgtcgccgtggtgcccggggagcagaaggccatggcgggtggaggcaggcgagcgtcctccacctccaccgtcgctcgctccggtttcgttgctagtggatggccatcggggtagaagagatgtgatgggttgactcgccgtagcctgtgggagagggaggggcctgtaaagcagtggtcagcaatgtacaagaatcgccggatcatcctcttccctgctgccaatggcggccgccggcggcgatggcgacggcgacggcggcggcggcgacgatggggatcttggctaggtttccacccgtacaagggcgtgaacgattaggaaaggtatactcatagattacttactcgtgggccgtatcctaatccagcatcgcgtgtttggcccaccacactcgtgggccggcccggctggaacggggcctcgtagcaacagctctgacgcacgtgacctctctttctcctcgagcgcagctgcgcaggtcgacgacccgggctccgccgccgccgcctcgcctcgccgccggcgcgctcgctcgctcggctggtccgcgtagtgggctgccttccatagtcggctctggaggagttttgagggagggaggcgcaggcatgggcgaggaagaagaagaccccgactggctccgcgcgttccaggtaaccatctcttctcctccgcctcccgtggccgtgtgatgtgccctagctaaatcctgccaggtctccgtgggaataaggtccatcctgccgagcggtttcgatttacccatttttctctgtggatttaagttgagaattgaactgaattagtgggcgcgctaataagtttgatctatgtcatttcacaaaatggcattccgtgttgtgcttctaggctatgtgttaaatatgctttgtgatgttcgtgagaatttcgtgctctttgataatccttcgcacaactcgatgcgaattttcggtattcagaaaacgttgtttgtacatgtgtttaacaacttgtttacttggtctatgccaatggttttgctaaacggtcccgctatggtatcgccgattcctagtttaaacacaacgaacacatgtcttgattttggttccgatgtccgataggctccgatgtgaggcagcaagcatgttctgtatctagtacttgttacactttctgttcttggtacaacttctctggctttccaagattgtgacttgttattggtgataatatcaccaattttattttgcataatttttcgtagccaccaactacatcgacggtgatgctttcttcgggctccgatgattctcctgaaaacagtcctacacggactacaccatctggagaagaacaaaagggggaaaacaaggctagttcagaccatgcaggggatggagatgctgctgcactaaataagggcaaaaaggcaacacctactaggaggaaaacccctactagtcaagaaggtatcattagtttactactccctccatcccaaaatataacaacatctagccttcataatttgccctaaaatataacttcttctccacatacattctcttcttagccaatctcaactttccaccattcaaatcccttcccacctcctcttctcaatcaatcacaacattcctctatttaattccaccatctttcttaatgcctgtattcaaccctaaaactcatattttgggacggagatagtaatatttattattttgttatgacaaacttccaaactagtatctcctttttattcactttctgatctattttctcttcatggttgcctatagatgctttcgacaaagatgagaaaccaaccatggaatcaaatcaagataagcctccaaaacgctcggtaactactataattcttattttgttcttaattgtttaatccctgttcgtggtacctcgccatctggtttctaattagttatgctgctgatatgtgatatgcccatgtaaaaagaacaatttaaaagatctatagatagattacgagctatccaagttcgaatgaggttcagcagattccctttttttctcaagatgctttattcctgatgtcaacaatacttcttgaatcttatcttacaactgttctacattatttgttattgatcgtcacataatgctactgttatatttaatactgacttcattgtacatattacttagttgcaaacaccaggtccactcttttgttaattctatgcctaaattttttgtacagactccaaagaagaagttggttaaacccccatctggttctaatgcttcaaaggttactggaccaaaagctggtccagatcaaatagatggtaagactaatgaaaagctttggttgccttttagtgaaaagtcagtttatgaattcttagtttcaatgattgataattatagtcatggtcatgcatagataccttggaacatcaagaagagggagttgctgaagaagaaatgcaggataaacttacagagcactctgtaagatgcctcaacttccttctatttttaatctattttttcctccacactacggttccagaacattgagagcattgacccaaacaaggagcaaagaaaacaaaattagagcccacatcttactgggaatatcccaacatgtgtcatttttgttattgcattatattgaactaatgaaagttgggtaaatccttttaagaaggtataggaaaatatgaaaataaacatcattttgtaaatatttatcaagctccaaccgattagttctttccttgattaccgtaatttttgtagagcatgatggcgtgtcttgttattcctttaactagttacgtcaatatgtctgagatatcttatggactgtaagctcttatgcgttccaggtctcccagaggttgccattaatcattcctgataaaattcagcgttcaaaggtatgataattctaactggcattatcaattagaaaccattgttctcataaaagggtcagtgtgtcaaatcataagtccggaatgcaatgagcaactctgctatcaccccccccctttcccatattttcttcatggaaaaatatcggtcaacttaacattggtggaaagaaattgtacaattaatagaaataccgcagtgacagagccataaatgagaaatggttggggccctttttagtgcaccaggagttagaaggagtataggctatatatattaaagagccatagatccttgataatccaccaaaatgtgttatatgtgctaaaatgcagtaaaatcaacatcttgacctctgcaagtatcatctacctggaagactgggaatcatgactgacccaatcaatgatagtttccctaagtttataaattataatcctataatccttgttctgtttatttctaggcattgattgaatgcgatggtgactcgatagacttaagtggagacgttggagctgttgggaggataataatttcaaacagtcctaacggaaatcaggaattgttattggacctaaaaggtaccagcaagtcgatttctttagtatcatttatgtattatgcactttggtttctgactaggcagggtatttttaccaacaagggatttgaaattaatgtccgtgttatcttactacatgcactattcaaaatactttacccatattattattatttttacttatatacttacacaggaacaatatacaaatcaacaattgttccatccaggacattttgcgttgtaagttacattcaaacttaaagtacagttgtgcatttgccttatttgttagtattgatcttaaatccttgatggactgtctctttttctcaggtcagtgtaggacaaacagaagcgaaggttgtcgatgataacataaatctcttatgagtatttgacttctccataatttttagtttaggcagttctactttctagtatgtagcgtgctatttttgctactaaatccgattaaaatatattattctgatggatgtagctgcttaccttattcaaccatttttccccttttgcagatagagtctatcatggatgactttattcaattggaaccccaatccaatttatttgaagcagagactatgatggaaggttagcattcttctagatggtctaattagaaatcttcagcccatatatcctactgtttctgacctataaagctgagcagcaaactgcgcgccaataaaagcagcacatcttatctttctttaatggagctattaagcaatgcattgtcatttgacagtgtagtcaggaacagtcattctgcatgaagtgatgactaatgaccctatcatttgatatgatgataacatctgctgcaatggttattttctaatactccaggcatgttatctttataggtacccttgatggattcacatttgattctgacgaggagggtgacaagcttcctgaaccgcatgcttctcaaaacgatcaaaataatgaagatggggatcaacctaaggcaaaaaccaaaagaaaagctgagaaaccggcagtatgttctctcctacccttttaatgatcctataagcttcttttcagtttcttttctattaccattatgccatctcagaatttaaaactgatgatggcacatgttagtacaaactgtatgaatacctgattcttgaactcctgaaagcgcattacattaccctatataagtttgaaacccaattgtggatagcttttccggaggttttacttatgtactgaagcactttgcctgttttgtatcatgaaattaaggaaccatgctataaactttgcgacatattatagttcctcatgacaaagtttgcttattcttgtgaaatgtaggggaagggacagaagaaggcgaaggttgcaggaaaggccactaagaagggtacaaggaaaacccaaactacgaagagaacaaagaaggcgaagaaatagacctgttgcgaaaccgggacgctaccagtaaagactagagaatccaactccaaatggatcagacttgagaaattccaaatgttgtatgatctgggttatcagtgtagcataatgtacttcttttaggcgtagaatgaaattagaagggatacacatgattgcaaaatccatttttatgtctatgaactctctgtctatcctcatttgtatgttgtataactatcaaatagccaaatttgaaaaagtctggatatcaaacacttgccattcatctttaaagtgattcgagctatttcacatgtgcaaattgaagctcactggcagcaagaacattctgaccactgttgttactccgtactagtattatacattttgctgttctgttttggcaagaagttgcatccaatcttaggctgtgtttagtttagcgcaaagtttggattttggttgaagttggagatgatgcgactgaaaagttgtgtatgtatgacacgttgatgtgatggaaaaggactgaagtttggatccaaactttggctgtgtttagttcagcgcaaagtttggattttggttgaaattggagatgatgtgattgaaaagttgtatgtgtatgacaggttgatgtgatagaaaaggactgaagtttggatccaaactttggatctaaacacagcatttggatctaaacacagccttacggttaaggctcattgttttgtctcagactctcaaacatgattgctggagacccagaagtagatcggggtagtcaacataaaaaacaaaaatggaagatggtcaattggtcactccataatatttttataaatcgacattttttattttggaaatagggataaagagggaaaaaaaaagcggcgtccgcttttcctggatcgggcttcacttaaaaaatcccatttttaaaagtaaaatagacgttgcagggaaaaaaattaaaatagtcactttgtaaattatttttggaataattgaataaatttaaattatatattggcatttttgaacaccaaatatccatttagctcattaacaacggtattcaggtatagtcaacataaacacggttggcaaaataaaataaaatagtaaagtgggtctaattgatttcttgcgctgaaacctactcatccggattagttcaaaacttagcattttgctcgcatttacgactaattattctttcggcgataaacaacatatctgtgaacaacgaagtacccgtggtgacttcatcaatctcaaaatatatcagcctagtcttcgtagaggtgagtgtgcacatcttacgaaccccctacatatatttctgaataataatgaaagaaatggtcccttcatagacgatatactccctctgtctctaaatataaggtattttgcttggatgtaacatattctagtccaacgaatctggacaggaagctgtccatccattatatttaaggatagagggagtactgttttggaaagtaaaatcaaattataaataaatacccttcagaaatatagagagggagagacgagagagagtgaaaaaaaaaacaaaaaaaaaagaagagcggcgtccgcgtttcctggcctcggtcgggctttcccactgcagcagcgaagcaagtcagtcctcctccctagtagtcgaccactgtgtaaatgcagccgcaacacaagggaattccaaggtttcccccaactcaactcccctccccttcgcttcccttcccttctctcctctcctctcctctcctcttctcccccccaaattcgccgccgcctcctctccccctctcctcctacccttccccgcggcggcggcgagaggcggcgcggtgcgtcccctcccctcccccgcactctgctggtgctggtgctgggctgccgttgggggaggcgggagatccgcccgggcccggggttccgtttcctcctcctgctcggtaagcggcaaaccctagcttcggtcggttgcttggatgggggtggatcgtgtgttcgttcgtttgttttaactccgctgtggcttgggtagtgggagaccgaagattgctgcgtcttcctctcgattcggttggtttagtgagggattcatttgctgtttagtgtgctagttagtggttgaatccttcgtgtaggatttagcatccaaggttggggtgcgcagttcatttccgcgacatttttgggagagggggtttcaactgagccccaatgctccgcgctaggtctgtgctcggtgagatcttcgggtgtgtaatgtgtgtgctggaatttgctgctctggttagagatctagaatttctcattatttgttctatgcttttcggtatttgccctgctggttagggcaggcagccaatagatgtactactactttgtttagattacaagcatctgtctttttttacatgcagcggctagtacattttcttgtctgctacgtactatgtaatgctgcttactgtacttgttatcatcatgtccattcagctctcagattaatactgtaatgtgttctttatggtaggtctcaacctgttgtaatactatccatcaccagcaatgaataccccagaaaagaaaccactgtgctatacttctagaagagcactgcaacagaggacagaatcctcttcggaattgatctctgtatcaaaaagagcaacccgccagaatactccacgcaagccggattctcctcccaaacgaacaacaagaagtagcgctaacctggcgaaatgtatagagaacaaacaccatagcagtcctctgaagcggcggcggggttcagatgcggctaccggaaagtctgcaacagggccaacaaggaggaagcataaacagaaaaggaaaaatgatgagagtgatgaggtcagtcgcatggaaaaaagagcaagatatttacttatcaaaataaaacaggagcagaatttgctagatgcatactctggagatggttggaatgggcacaggtatgcactgcttctctcttactgttgtaagcttctgagttttgactatagaaatattcaaatccaactaatcttacatgccaaaaggggaaaaagaaacctgaaattatttaattcatgcttgcatgattgtagtttttgacggaaaactcaaaagcaaaccagattaaaccttctcagtaacaaagttccattttgtttagggcaataatgagcaagggcttagaatgaggtttagaactactcatgaagagaaaatcattcacatttactgtatgcaaaccagatgagaacttatgttttaaccaccaatagcatcttaataataggaggatcagaatccatccctagctcattggctgtgaccaactcctcatgggtcagaaataatactggtatatgtatctgttggaagtaatcattttgacttgcgtagttgaagtagtgtcttgggatagaagtgctttactgtggaggacctctcaatcatgatatacacatctagtttgccttctaattgttaatttgttactgtcagttgtcaattagctatcaaagaactgttctataacggtctatactgatgctctcagtaagcttcacttgtgttgttttatatctaattctctctctctatatatatatatatatatatcctgatgttgcatagaatgaagtaacagtatgctatttatactatacttactaaagggtgtgcctttcctaacagtcgagagaaaataaagccagagaaggagctacagcgtgctaagaaacagatcatgaaatacaaaatcgctatccgtgacgtcattcaccaacttgatttgtgtagttccagtgggagcaaggatgactctgtgattccaccagatgggtgtcacgagtctgtcaatcctgaacatgtatgtatgtcatcaagtgaatatcaaactccctacttccataggattatatattgatacaatgttctcttttctagacaatatgttcaaggtgcaaatcccacgagtcatttcctgacaataacattatattctgtgaggggggctgcaaactggcgtgtcatcagaaatgtttggagcctccttttgataaaagtgggtaatcatttctcttaacttctttcaaaatatgaggttccacctttttggtaaatgaatgtagttttgtttagtgtcaattttttaatatatatttctactttatgtagtgaccagtgcagtgtacgaactcaaccataatctgaactttccaatttcctcaaaaataaactgaacttagcactctactatgttatgttgtggtccaacacttcaaaataaatgtaggacatctctagtgtgtagagtctagactctgctgtcactccatgcataacttgtcttctactttttagcatgtgatgattctttagcatgaataaacatttatatgcctttttaaagaaatgaaagtatggcatgagttcctataaaataatgtatgttttaagttattgcttcagaataatgtaatgtggtgtgctgtaccaaacatcatagtgtaccttctattctgatgattatgcatccatgtcacctgctgcagttgctccacctgatatgttgctgcaatggctactttacagtttgtgatgtatctaactttgttttgtggtatctctcagttcttccaactacccgccatgggcggctttgcaaacactgttcttccaagatgaaaattttagacgccattaatgcccatctggggacaagttttacagtgaagtgtccctccagtgtaagtttttttgttctttacgttcaagttttgatcaccttttagttctttacgttcatgttttgatcaccttttactcaagtggtttaattgtgttgaataagccttgattctgcttgctttctataggatattttcaaggaagcagctgaacatttcaactctgatgatggactgggccaagattggctatctgagtattcaggtgatgaggactatgaccctgaagaaaatgaggccagcagcagtggtgaagagaataaatctgccgattccaattgttcagggagtccactttattctccaaatgatgatattccagacttcatatcagcagatttcaatgatgctgaaggattctgtcgtgaaagttcaaatctaggaatcgattttggtgaagatggtttggctgagattcttacccaccaaaggccaagaagagatgttgactatacacaacttaatgaggtgtgctttatcaacaggaaattgtattctatgaatagcggagtttaaatagatgtgtctgttattaactgtgaatactgtattagtaagttccttttcatcactaagatggatcaacgctattatgaccacttctctccattcacagcaaatgtttggagagcctattggcaatgacgaacagagtgaagatgaagattggggtcttaacaagagaaagaaaagaagaactggttcaactggtgttgggactaattccgtagagggtcgatcagatgtcaaatccaataagaaagcccaacctcggagaaaacttttcaggattcctcctgcggcagttgaggtaacttggaatgtttattatctcaaaaaacatattatcagcattacatcttaattctatgatcgcgtatttgctgtaacacaaaacagaaagtcaattgatggtgaaattcactgatctactgtgcctgtagctgtgaccgtgtgtttttttcaggacacttgcttaatgcctcgtattattctctgttaaattaggtgctccgtaaagcttttgctgaaaatgagcttcctgcccggagtgtcaaagaaaatctctcaacagagctgggtatttcttttgaaaaggtttgttgtgttgtgttgaataatttatttcttacatatgttaattcacctggatattttgttttgctagtcaatttttggcagcactcaccagatcatactccgaagttcaattttcaaaatacagcaaacaatgtgtatgacttttaagttcagatgtatattttgtagttgatcaccttttccttctaatgtgatgggttcatctttgaagtatagaagtattaccaagtttgtctttgcggaatcaatgaactcattgaccaatgacaaatgtctgatctctttgcagattgataagtggttcaaaaatacacggtgtgctgctctcagggataggaaggcatgcatttcttatctcacatttattcatataatctgaatatttgttttcttgcatccgcatgcccccaaatgttccctctgggtttatctatacattccatgtgcccatgcaaacatttgaatatgttgcctgtaaaaaattgaagtcctaaaaatgtattagtagattcattatgtatgatagttactctgagtttgatgcatgatattcatcgactgaaattttgtctttcatgcattacattccttcactatggcaactttacaatctgttatttttaagttcctggcaacatctcacatagtgcccagggttttcgtaagttaaccgttggcattgtctttcagggtgaaagtcgttattctggtcccagcaaaaggtcaagaacaagcatagaaaaggctgaaacttcagctaaagtggatcaaatggacaactcatgctttcttcccttatctgaaataatcaacgtgcccacacgtctgcagaaaggtcttgataagaagccaaaatcaattaacagccctccaagacctcaggacaatgaaacttgcttgtcgccaactgataaaaccaaggtataaacagcaagcgctgataagggcttccacctgaaatagtttactccttttgaatccacccagttaattgtgtggtcttaacttgtctgcttaacttgtcttgtttgcaggagggtacaccgcctacgatcaagccttccatcacagattctagtcaactgatgaataacaacatcggcactgaggagactgctgtttcttgggtggacacttgggcctctgacgctctgcatttcttggacgtgagcgatgatgaacatttcttcgatgtgatcgagaaggtgtgcggtctcgagaatcggctgcagcggttgaaggagaacatgctatcatcgtcatcgtcaactgacaacaatgtggctgctgagagtggcttgcaaaacgaagttgtgcttgtaccagctgctgagctcaaggataaagcatcttaaccttgcatctgggtcccaatgctttgcttcagttgaccatttgctcataggattttatacatcagaaaatagtacaggaggggctggagtgtagcttgccccgtttatctttgaacttatataccggtgaactggtaccattctatatagggagggacagataattcggattaggttcgtgaggatttgcaaagagttagtttaactgtaatctttcagctggaactttgttcagcgagtaataggtcatggacaattaccaaatgcatgcgtaattctcgctctctgtccacaaatgtagcgaatatttttatttgtgcatgcatgatatactaaactactctaattgacctctacctaattagatagcattcgttaagggtatagaggaaccaatacacacttaagtttgaatgtgaatatgccttgtatttgtggacggagggagtatcattcattccatagtactaaacactaccgtgattttgacttttttttcccttttactgctaccgatttctccaataattttacataacacgggtaacaatgttttcgcttcaatttacatgcacctggaactgaaacccataagggcatacaatcatttcttagaatagttcatttaaagggtaaagtaattgccatacattcacagaaatggcctttcaagtcacatgtattctgggaacgagacagggcaacaaaacagatatttgtacagcgaaaagatcctaatccttttcaggtgagtgattagcagcaatctggttagcaagcatacaagcacagagagagattaaattttaaataattttagagttaattttatttttttatcatagtttactttttaattagctaaaaaatacctaaatttttttaatcgctaataagtgttacagattatagtcaactataagcaaaacgatggactcgtactgctaattggataagcagcaatcccctgcaatctggtaatgataagagtgatctgctggccggtcacacctgcacggttcatcctccctctactttttagcggccatgatccgtgtgcctcttgtgcacatacatttagcactcatacattgcattatccatagcaaatggtagatggattagcaggccaagtgtctcaatttctcaccatccatccatctgatgagagagagagaaagatagtcagacaaatctagagagagaatagtacagagtgacagaattgggagaggagataagatgggcagctcatgggttttagctgatggtgacagtactttgcccttttcctgctagcccagggggatatgtgcatatttccctttggtttggacccttgtgaaaacgtttcacactgattgatgtaatttgctgtacgtttttgttcgtttggtgttttgagttcgacagcaacactttgtgcatcagttggtactacagttccatgcaaatgccggccaaacttaccacctcttatgtctggactccctttaaaatgtactatgaacttcctataaaatctccagtatgtcccaaacggttattaccgagggtttttaatctgaatgagtatatatattactacctccgtcctaaatataataataggaaaaattagatgtatccgtcctaaattgatttcatgtccagattcattgtccggaaagagtctaatcatacgaagattgttatattagtgttgactacaaccatctcacgttgatcacaaattacttctaaataattactttatgatgaatgatagtcgttgtacctttatatttatggcaccacgtacctttataatttaagcttgaatagtaacagtgcaaattatttgagaatacaggaagtatattgcccacaggtttgggctgcactttgtcgatgagctcaacctttcatcagtgtaaattatttgagagtacagtatagctacagtgtattgtacgggctgcaggacaaaataaacagtttgcaattccccaaacccagatgatgtgtacagaatacagatccaagaacatatatatacgtatttgtatatagtagtacctatatacacatatatcctaacactttgaactgcagtctagagctgaactgcagatgtaccgtatgaacggatctaactgcatggctgcagcaggtgcagggaaagaaagaggaaacactgtattggtgttttggtcagaaatggatacgtgtccagcactgccatgtcctgtgaattttggacctgaggccttagataaaaaaaatttagccaaaaacgtcccatcaaatatttggacatatacatagaatattaaatgtgaaaaaaatcaattacacagtttgcatgtaaattgcgagacaaatcttttgagcctaattacgctatgatttgatagtgtgatgctacagtaaacatttactaatgacgaattaatttggcttaataaattcgtctcacagtttacaagagaaatttgtaatttgttttgttattagtctacgcttaatacttcaaatgcgtgtccctgtgcttcaaaaactttacacccaaaaaaactaaatacaccttgacaaaatcaacagcaaggccgagtttagatccaaagtttttcttcaaactttcaacttttccatcacattaaaactttcctacacacacaaacttttaacttttccatcgcatcgttccaatttcaaccaaacttccaattttggcgtgaactaaggcagtgtttagttcccccaaattcccagctttccatcacatcatatcacatcgaaaactttcctacacacataaactaccaactttttctctaaactaccaactttctttcaacttcctaactttttcaccatctaaacacagcctaaacacacctcaagtccgtgtattcagtcttgttcagaggttaaattttcagaaccggcctagggccgtgtttatttgtttcggaatttttttttacgtgtacggacacatatttgaagtattaaacgtagactaatgacaaaacaaattaaaaattccgcctgtaaactgcgagacgaatctattaagcttaattaatccgtcattagcaaatgtttactgtagcaccacattgtcaaatcatggcgtaattaggcttaaaagattcgtctagcaatttacatgcaaattgtgcaattggtttttttcgttcatatttaatgcttcatgcatgtgtttaaacatttaatgtgatagaaaagttcaaagtttgaagtaactaaacacagcactactccaaattcaattggattctgtagatatttatgtccagcacacctctcttgaaacataatcatcatctgtagatatatccagcactttcaacttaatttgcttgatttaatcaagtctcttaattaatggtttagtgtatcagtatatcaccggatggatggctaattaattaagattctgctaagctaaggtgataagcggtagataaacaactaaaaataatcagaaatgacttgtaggtcaaatttctatgagtaaatttcacaaaattataggtattttgcataatttatcacaaaactacagatttaagagcttgtttcataaaactacatatttagtgtctatttttatcacaaaactataggtactttgtataatctatcacaaaactatatatttaagaacttgttttataaaactatagatttagtgtattcgtttatcccataactacacatttagtgtcttcttttatcaaaaaactacatgtttagtgtcttcattatcacaaaactacaggttttaacaatgctaaaacatgtatttttgtgataatgaagacactaaacttgtagttttgtgataaatgaagatattaaatctgtagttttgtgaaacaagttcttaaatctgtagttttgtgatgtattgtgcaaagtacctgtagttttgtgataaacgtagacactaaatctgtagttttgtgaaatatattcttaaatatatagttttgtgatagaatgtacaaaatatatgcagttttatgaaatttactcgatttctgtatacataaatctctctcactagacgtaggagtaaaactctctctagagatctctcttgctcttttttttttctctcgttgtcgtatagactagtagtgtggtcacacacaccaaacaagcatggcaggcatgcactgttgcagcaagaacacaaggaagcacggtcacatgcatcgattggtgtgaccatttggtcgcattacccttcatccatcgatctgtacacacctcccatggatatatatgtacatcgatctatatatattggagtgtatgcatgcatgcaacctagctacatatccatgcatgtctcaacaaattgacacgcatcgtcatcgacatcaatataaacgcatcgatgcggcacgcatggcatgcatgattatcaatatgatatgcataatgtatgtatgatacatgcatgcacatatcgatagaggttaaagcttgaaaagctaagtgtcactgaggaaatatttttttttatcacctgaatagatgtacacccgtttattatatgtaacctaaatagttatatatatttttaaaaaaattgataagatattatattaatatgtaatactatatcatttcatgaattcgatttttataagttatataacataacaaattaaactctaattactatacatatatccatagtcaattttgtttttttatgacttattgacctttattttctttaattacttgataaccattcagtttgcatctaataaatgagtagatgaccattgaatgtttggtgatccaacgtgacgttacgaacatgggtgaaaactatatgaaaatttccgaccatactgacacaccgtttccgcaaactaatagtatatataataataatatttttatcgactgttttaaaaattcagttttttataaatataaaaattttctgacctttccgatcgtttttgtaaaaataataaaataatgataccgtttccacccgttttcttcccctagttacggctatctgatatcgatctgcaatgcacacttgcacaggtcgcaatctccgagtgccatgatgcgcgctcgtactgcactttgcttggatgtttcttccgaagaaatgcacggcaaccagatccagattatcgtacagtactagtagccctgcaaaagtaggagtaacttgtttttactcgtgctgctgcattgcatatgcatgctagcttaattggcaccacgacgcattccctgcacaaaagctgtaaaatgcttctactcctcgatcacctctcgctagattaggctcttgcatgcgttgccatcggatgccacaccatatgcacagatgccgtgcatggatccgatccttgtagttagtgttgtgcgtctaacatgtgagcctttattgttctttgagtcaacaatatgacgacaataacaaaacatcagtaatggtttttaaagatgataaatagaatttcagtctatatttatgtcaagcacatcggtaacggtagaggattgtaatcccataattaagcttatggagaaagaagaagaggtacatgcccttctataaggacgatagtattgcatgtgtcacatttcttaaatccctgaaaggatacatactccacagtgcaggttatttttaatgggtcacactagtatctcctcccctccccctctttgtctttatccaccggtagaagaagcctgcggagcgacagcccaagtggcaataacgtcctcaagtagcaaacactaggcagagcagaggcggcatcaccgcctcttcattggggccggaagccgcggaagaagacgcggacaacggcgccaccgagctcgcccaaaccgtcctagggctcattggatctagcctcaggcggtggtggcagctcagtaccaacgccacctcacccttctccctcctcgcactagttccaccctccctccaacccgccttcaactctagccgccgccatcgcctgtcgcctcttcgggctctccaagacaaggaagcttccccgatctcaggtgccaccactgtcccctcctcattggtcgggcagatcaggccgtccctttcaaagccgatcgaggtggcagcggtggacatggagctcgacggtggtaaatctggtgtctagtagtagcagacatggagcttggcagcaatggcatcatcgtccgtgtcacttcgctaggtaatccctccctctccccccccaccccccacccctccctcccctctctctctcctggtttttgcttcctatcatgtttttttttttttgacaatgccactagttccttgtagggagacacattcttcgtcagggtgagcaagatggcaggttaagacactaatgttcgctaggtgcgctgaaaaatgcgataagatgtcaacagggttaaccttgtgcagggcacgatcgagactgcgtgcatccctgagagggtgggcgtcagagaggaagtagttactgcgcacgcacagacacacatgcatggttaagtaaactgtcaaacaaaaaatggagatggtgctagctggagcagctgcatatatcgtccgtcccccttgaacatttcgggaaagcaggatcgcgcacgcacgcacgcgtcacgccgcgcgcgcgaccacccccacccttccttggctttggcttggtttggcccggcgcgccgctcgcccgcgcgacagcccgtacgagcagaaaaagggaaaactgcatgttcagcagcagcagcagcagcagagagcagacgacgacgagatgagcgtcctgctcctcctgcccatcgaaatcgactgatcctcttcttttcacaagtccttttttcgcattgcacaagtcgtcgcgaccccaaaagcaccagctctagttttaccacctgctgttacctactccctcagttctaaatataaacaaccctccgtacggattcgttgtactataatgggtcacatccatcctagattgtctttttttagaacggagggagtagctagcactagcagcaagttgcaattacgtgcagaagatgcatggtgtttttttttaaaaaaaatatagcaccattaatttttcacataaagtttaactatttatcttattatttaaaaatttataaggtaagattatagtttattccatgacaaaacaagttaaaaataaaaaaatttattttttttctaataagacaaatagttaaacatcatataaaatatcaatggcatcatacaaagctgcaaactaaaaaaaataagggagcgaaaatggctatctctgcactcgtgcactgtgagttgttttcctttttattttctaatatctgttgatgttggtatatgtattgacacactatatataaacccaagcagaattccaaggtatttatcgtgtgtgtggttcatgttttctagaactcctccgacctgtcagtctgtcacgcacatatcatttctaaaaaaataatattcttttaaggaagaaaaagaaaatatcaagtccaatggcactatattcatttattaatttgtccattatatataaaatctaaatctttccccttcatgtttttttctggctcctcttgttttcttcagtagcttagctaaaatctgaaaaattaattatcatgtccggtgcgtcgtgtggtaccaccattcggcaaggtctcgtgtcatgcttgattcgccatgctacacatcttaattcgtttggcactacagtgacaacaaaccataccataggacatgcatatctctctctctctctctctctctctctctctcatgcaaattgctgctaatataatgcctagctacaaatatctcctaggtagagggacaaattcatatccaaatcgtgtcctttggataaagtccctagtagtacatgagtagcacatatcaaatatgctttcttcatacatgtatacacatggcatgttatatgtcaagaaaaaaatccattttactcccccgaacatttttacggagcacttaaccccctcaacaaattattggctcgttttaacacttcaaactattgaaaatggttcaccttactagctagggtttgaaatttcagtaatttcaggcctcacccgcaaacacaaatctccccaaaattttcattttttgtcaaatatttataaatttgtttaaattcagtcaaaaaatgttaagatttcaaataattttggtccgaataacctggaaatcacgaaatttttaattttttggtaaccaccgaaattgaaaaccttgttactagatcccaaatattattttttttcttttcatctctctctatataagtcgtactttgcaatgcaatttagtagaattggtatatgcatgatttttttttgaaacctaagcaaaactttgttccacttttatatttagaagaagagaattggtatatgcatgataatttacctttcaatactttttcatcgttgtttacataggttggaagcactaagactaatttaaacatacatgttttaaaattcaagctaatagtcatgaaaatattttagaactatgataagtgatccaacgagatagtttgggtgagtaaaatgttttttctttcatatatcaatagtactagagaaaatattgtagtttggagtcgtttctcgcgatcgatttttcgggaagatgttcggatatatgtcgacaacaaaggagagccgtaaaatgggtcttttgccaatggagacaaagggacaaaattgcttcaaaatagccggcgagcaacagcacacatctgtaagtacgttctaggtcacctgcagctgatggggatgagccctatccttaactgtgttgtatctactatacgtagatgtacacgattggttggtacatcctggccattcaagctggggaagattaagtgctgtgttggaactttggtggcaacagctatagagatatttatcttaaaattagtcaaaatactgaaatatataaaagatatatatggagaaacacacaggggtccgaagcctcaccccttctaattatttgatattaggacattccctaatattcgcgtctttataaaagatatatatgcaagagtaatatatattgcatctatatgtagctaagctagcaaacacttaaaatatgtggtattactttgccccctgtatcctattgccatttccattaatttgttgtatataattatgagttccaataataagaataattttctaaaattaaatcatgacataattatctaattgcataaataatccaattcccattgtcaaactagaaaaatctattttatatttgtgtaaagaacaaagcgtgggctgccagccacgaagagacacttttgaagtaaaaataaaataaaatatcttgcaaaatatccagccatgcctgtcctacaaggacccaaggaaaaacctcatcctaaacaagagcaaaggattaatttggttggccagaaatggctcaaatggcccctcctctctatcattagtggttgaaccatggggtcacaacgtatggggcatggctaccacacatcctaattctcctattcataaattttaataagaacgtcgctttgcgcacgcacccgataatagcccgtggtttccatcaccagatgacaatatggccctactggctgacatatttcaccggacccatctctagctgaatatcgtgatgtaattcctcacagagatagttttatgtcgaaagtttttcttttctgtcatgtgaagcattatctctgaatttaaaagggacccaaatcttgcaacacaaaaacaaaataggaagagctttatttgtgcatgtaacagtaatctctctctcatctcatggtgttgcatttggggccaatcatggtcagccatggatgcgaacaagcttccaagatccggtgggacccaccctcctcggcatctcgtgaaaaggttgccgagccgataaagagcgtgccacgtgtgcagagagaatccggggagccaatgggagggcgccacgtcagcggatagggcaaattatagtgggtgcttttccgttgggaggtcagtactcacagtagcctagttgaggggtagatgggatgggcaaccacaagaggcctctgttgtttctttactgaaatgccccttgttgttcttgcttttgctgttggtgtgattggaactttgcactggatactttttgaggtagattgtctcttaattttaaggcaaatctgtgggcaaatgttttggtgactgtaaaattatgggcggttcattttgatgttacttttaaccataccatttattggcaaacttgacaaaaaaaaagtctacgtttagtttgttgccaaatttagtaaatatataagaaatcctgccaaaattttgacaatattgccatcttaccaaaattttagcattatcaaaatttggttagatttattttggctacaatctaaacaggcccgatagtagttggcaattaatttctccaaagaattttttttcatgtaaatgaaacatgcttgtgtgcatcaatagtctaattcaatgtataaggaaaccatatgcaaggccttagtttaaggcaaagctgtgggcaaatagtttggtaatcatgagtcgatagttgacaataattcacttatgttaagaaaatactgtataaataaaacatccatgttcatcaatactctgaattttcatatgtttatcaaacttaagcgagttgaattggtctaattcaatgcatagggaaaccatgtcgactccatttttttttatgaaacatgttgattttatctcataagaggtggcaccgagaatgcaaattttcacttgtcagattcgcccatggatacaagtttaaatgacaacttgtatcaaacttttaattttgtgcgctggtatttgcttcttgtcggttagacctaatgtgttgtcatctaaccaaaaaagagtagaaaaggagagaactgcatatcctgcataaggtaggaacatgtactgaatctgtcgagacattcgacaaaaaatatgtgtctaattaacacctagtaaatgacaacaaacttgatcaaacaaataatatactatacttgcataggagaatcacagttaaaaaataataatataccgattgtttctaggagatacctaatcaatattataacgtctctagcatcttcacacagacgtgtagctagcatgagacaacctgcaggagaagtgtcacttgacatttcgccaaaaacatatggaggaatgcttcagagctttttggttttcatccagcacaagaagcatggagacaaggtgcactggtccaaaatactgtatagaataattgagttgagtaatcttttagtcccatgattcattggccagtgccgtctctacagagtaaatattgattaggggaacgtttagcaacagccaacagacaatcaggaactacctaacaaatagttacctttgtcatgtgttccaataataaataaatgagaatgaatcaatcataaaacctaattacatgtagggcatgtttagttccctaaaaacttttcctaaaaacatcacatcgaatctttggacacatatatagagcattaaatatagataaaaagaaaaactaattgcacagtttgcatctaaatcgcgagacgaatcttttgagcataattaggccatgattagccataagtgctacagtacccacatgtgctaacgatggattaattaggctcaaaagatttgtctcgtagtttccaggcgagttatgaaattagttttttcatttgtgtctaaaaaaccccttccgacatccggtcaaacggccgatgtgacacccaaaaattttcatttcaccaactaaacaggcccgtactaattaactatagattacagcctcctcaaaatcatgtatgttaaccctaaatattgtccacttttttttgttaaatcttgccaacatttatctctctcttctaatatttcacatttgattatttcccccaaaataggacttataaatactatgtacttcatgatatctaaagaatttttaaaaaggtttttacaattaccaggtgagggtgatgaagttttcaacactactgcctagggcaaattggtctcaattatactaactgcaaatccagatgccccaaacaatgccaacatatgtacaacctagagagatgaggagaggaaaaaaagagcacaaagaagatgtggagagaggagggtggcctgcacaaaatgcaagtgtgggtccagctaatttgcagtgggtcccacaggcaggggggaaggaaagggacccaatgagaggaggcttgtctcttcctctagccttcttccttctccctctaaaaccccaccccctcctcccttctcttgaaccctttcttcctcctccctcctccagttccccacatctctctctctctctttctctctctaacccctctcctaccatagtactaccatctctctctttctctctcctcaactagaattagcattgctgctctgctcatctatctccaatcccaaaacatttctcaattcagctcagagaattctcctcctcctgttgctgctctgtgcctctgctctgctccttgacttcttcttgccacacagcagtacagctacagaagcagagtcttttcaatccctcatcttttccaaggtgttcttggagttgaaccttttttgcctttggagaatccccaaggttgctgctgagctttgtgttgcagtttgaagtgaagttggaacacctttcccaaaattttcattttttggggtgcctttttcaccttcttgtcaatcttattacaaggcatcagaaagtttcagaggaaaggaaatttttcccagttgttttcattgcttttggagagtttggcagccttgagattttaggggtttaggcgtttcttggacgaacacctcgagctcttctccatttgcagcttgccaagaagctgatcggccattgcaatgtcgtcttcttgcataccgaccggcctgaggctggacctggacatcgtgaaggcggcgacgtcgccgggcgcgcactcgtcgccgctgcggccggcgcactcgtcgccgtcgtcgacgctgtcggaggcgtcgaacacgtcgtcgtcgtcggcgacgtcggtgtcgctgaagcgcgccagggcgccgcggaagcggccgaaccaggcgtacaacgaggcggcggcgctgctcgcgtccatccacccctccgtcttccccgtcaagaagagccccaagacggcgtcgcggccgccgacgaggcagctctccggcttgtcggcggtgttcgacccctcctccgacctcctcccgccgctccccgtcctcgccgacgccgcattcctcctccgcgacacgccgccgacgccgcggcagaactgctcgtcgccggcgccggtgagcagcgctttccgggagttccgcgacccggcgccgctgtcaccggcgagcccccacaccaccgacgagcccggcgagctcgacttcgacgacgactgcttcctcgacgtcgacgaggccgcggccgacggcgcggccgggggcatcgacggcatcatgggcagcctcaccgtggagaccaacacagccgccgccacaacctccgacgactccatcctctccagctccggcatacacccttacctcaggagcctcatggtggtcggcctcgccggccggttcgagctcggcctcggctcgcgccacggcgcgcggccaaacctcaaccgcgcgctcaagcggcgcgacgacgacggcgcgtggtggatgtggccggccgtgccagtgaaagacatcaccgtggcgccgccgccgccgacgccgacgccgacgccgccacggccacaggggacagcgtcgaacaccacggccgcaatgccatcgccaccatcggcgccggagaagaagaagagcaagaagaagaaggtggtgaaggtggagaaggtgatggcgagggagaaggaggaggaggagtcgccgcccgacgcgaggtgcaaggaggaggaagccgccgatggaacagtggacgccggcaatggcgacggcgcgccgacgatggcgcccaagaccgggttggggctgaagctcgacgccgacgacgtgctcaaggcgtggtccggcaaggggtcgatgttcgccgacggcggcgcgccggagtcgcccaagtcggccgccgaagtgcgggtgagtaaatgaattcactcaaacatggcaaatattttccatataaaaatggtttattaaaataggagagtaaaacataggacacatatattatatttgatgaatgaataaagtaactcaacttctaaaaattcatatttgttctgtacggagtgatagctcattcagtataaaaaaactcatttagtataagatagatttggcacaatttttagatgaaatttacctcttccatagcattgttactcagattgaagggacatattccaagcaaaaaatgaacagatgaactctgaatatgttttatggttaacgtttttattgcagttgcataacaagaaagaatttatgtcatttgtagcttatttagttattttcacctccgtttctacaattcttctaataagaatttcttttagaatgaagatacataagttgtatatccaaccaattgtttcctatagtgaaaataacaaggaaagagccagtaaaacacgtgttcgatatgcaacagccacttggagaactagcctctgatttggaactgtttatccaaaaggacggtccctcacaagtcacaacagtacaacactatagtactctagtacatatttgtaagcaagcaccttttgtagagtttcactgatactgtctccagtaatccataaaaatggatgtattcagaagtgatgaaattctgtaaaaaaaacaacacctagatagtttagaggtttgaagtaaacctatgcagttaaaatgaattattcaacaatggaccacagacaattgggcctggagatcgtctgccatggattacatggttgtcttcttgcaaagagtcatttgggctcaaatctttgccctctgggccagtgatggagcatctgcaacaaactccagccccaattcagttggctttttctgcaatttgctctcacaaatggcaagatttgcagctgtcataatggggaaacataaccgtcccagatgtgtccggcttctatgtagtttggacacactatgcattggcatgtattgctactatgagaaacattataacgatgattcaaactgtagacgtaatttgcatctctttcctaggattctgaatgaaaagaagcacttacagtctttttttactgctggtgcaggctaaacttgcagatattgatctgttccctgagaatggaaatggtgctggtggcatcagggaagccagcgtcatgaggtacaaggagaagcggcgcacccgactgttctcgaagaagatccggtaccaggtccggaaggtgaacgcagactgccggcctcggatgaaggcaagcactagaactgattcttgaaagcataaaaaaaggtccatttaattgtaaggcaaaaaccaaagaactcattgttcacaacataatacccccatttgtttcacctagagctatacattatagcactatcagagcagatcttgcaagttactgatttgttgtttctgtgcttggattcttgcagggaaggtttgttaggagcccatctcttcttcaacaagtcctggaggaagagagctagacagagtgacagacagtgatacttgctagccttttttatgagcaccctttttggccttttagttcctcattagctaagagatgtgatgagtgaggttttattttttggctttgtttggagttttgctttggaggaagatagagaagcctttagaatgagttgtgatggaggatcacatagtttgtctcaggtttacaatgtgcggtaaaaaaaaggaaggaaataaagtgatgttagaatatacagttttttaatccatttctacagcttcaaattctcgattgagcggcacgttctttgaaatgttcatagcaaagcaaatcaaacgaaatggatgagatttgaaactaagaaactgcacttgacaaagcacgctgcgctctctgaaattcatgttcagcagaacgcctttcagaaattcatgttctgctgctgcaggaaggcagctaagaactccatgcaataaaaatataaaatgcagtgcagttattagttagtgtagtagtaatctaagaaacaacaggtttaacagaatattaccttcaaaaacatcccctcaaatcaagactcggaaatcaacaccattctgaaactagatgcaatactgcgctcctaatggaatcttcagtggttactcctacacgccactaaaaaaaacgggctttggaaaaacgtcaccctgaaacaaaagctcagtaaaaataccactctaaaatcttgcagcatgcaatatcacaaaagcagatcaatccgtaattgtatttatgctgcatataccgtgatattttctgtgatcctctgcactatcttcagctcatcagctgcatattttgaagccggactgatggctcatcgctttgtttcggcttattgtgatagccatccatgcgttgacgaaagatttagatatatcacaattttaaccaagttcagagcaatgttagctttagctgatgatatacacggcgcactgattgccgccgttattttcagagccttgtaaaacctgaaacaaattgtgtctccaaattcttactagtactgcagacatagcggatttgttttcaggatgaattatcacaaaggtaagtcaattcatagccatattacgcaagttcaaaactgcaggccacaccatacgtttctgaaagtagaaacaagagatcttgcagcagatcaccactaaagaagcagtaaccgcaaaaaattataacataatccagaattaacacttcgcagcattactgaattcactttaatagcacttctcatcatgaactagtacaacaacataactgtccagtggaaatgtgaaatgcatacaccaagtaatggtccataacatgaactatatggatacaacaacgttcttatttcgctcatatatacatgaaataagtcttgcacgtcttggttacttaataggtgcgataatcgccgtaggcttttagaagaagaaaaaaaagtgagcctgcaaagttcctggggacagttgaagatcatcgggcactcattgctgcaacaacttcagggtggtagtggagcatctcgtgccacatcatttccctgatcatatctgcactgatgttctcgtctatgtccagatcgataggcacttgcgcgggaggatttgcacttggatcatacagaggggacatgtaagggtgctcaagagcctcggtgacactgattcttttggtaggatcaaatatgagcatcttctgtaaaagatcaatggcaagagggtgtgcatgcggatacatactcgcgaggggcacaccgggagtgtaggggagggatttgatatatctgcgagcttttgggttgtcaatgaactccaagtcagactcgctcatggtgccaagaacattgacaatgagcttgagctgatttaggcactcagttcctgggaaaataggtttccgaccaagtagctcagcgaagatgcaaccaacagaccaaacatcaatggaagtgccatagttgtcacagcaaaggagcaactcaggagctctataccagcgggtgacaacatactcagtcataaactgacctttactactgtttgtgcgtgcaagaccaaaatcacatatcttgagatcacagtttgcattaaccagtagatttccaggtttcaggtctctgtggagtatctctgctgaatggagatatttcagtcctcgaagcaactacaatcaagaaaacaacattctcttaaatcatctggaaaatacggattgcaaaaaataagaaatacatggtagacaatccaaaatgaactcaagacaacagaataaatgaatctgaagggtaggatgaacagacaattcatcagaaaaatatttatgtcttgtaaacaagagggtctacttgtgtggtttcatgcagaagcctctatgcagaactatttgaaagaagatctaggttttagattatgaactgtatatgaaattcttaatggaaatgtggtttaacgaaattaataaaataagttagaatagatggaaatctaaaaagggctagatggttccagttccagttttaggttgaacggacattagaatagctgcttttttatgtacttgatgaggcaacaagggaatgcatggatgttgtgcctgtgacacatgaaaataaatgttcaactctacaaattaaaataaaatgtataaaaagaggaatcatgatggcaatacttaatgcacaaagtgtgtagtttagtttgtctcaaagctgcagactacagggatatagttttgccttccatctatttattatcagtctaaactgttggaatctgggttggaataaatatagtaggccattttttcagtttttttcaaatactactaatgcaaaaacatcaaatcaactggaatcaaactgaatgatactacaagttacattggttatttcaaattaggaatacattactcaaaaaagtattgtcattgacatgctcacaaatcattgctgaagcaaaacattcacaattttacatgtttaaaaaatcagtttgactttgaagttttaactgacagaagaaccattcaagttaagattgtgcctcgtgcatttgggaatgaaccatcttataagactggatgaggcttgccgatataagatgcactgtcacaaattctaagcaatcatcaagggccattaaaaacacacaattactcttgagtaagtaaatgtagaatagaatagaaaagagaggtccaggtattacctgaaaaagaaaatattggcagtgatcattggaaagaccctgaggtgacttgattatctgatgcaggtcagtatccatgagttcataaactaagtacacatctttaaaactcctcctgtgtactggcatcattatatccttcaaagcaataacattctcatggcggagatgccggagaagtttcagctcccgcaaagtccttagtgcatcaacacggttgtcaaaaacattgtgtatcttctttattgctactttctcgttggtctcacgatttatggatgaacaaacaatcccataagctcctcgcccgatgggcttgattggcacatacttagtgtctatctcaaacaaagtttgccacatcgagtagtaatacttcccttggttacccatcccatttggaggatccaccatgatcgccatttcctactaaggaaacaaaagaaaataagttagtactaccttaggaaataacaacggctttttgagcttacacaactgccaaactatctatgaatgcagaagatcaaacaactttgtaatcaaagatgagctataaattaaacgcagtcccagtcttcaagatgagctttcagttgctcggctatggttctgaatgaacatggagcatcgatccccgcacactcatacagatgctccatcaccaagcatgcattgccgcctgcatttatctcctcccgcctttagaaccgccatggtggtggtaccaattcccaatcccggagaaagacatggacacccatcccacggttcatggatgcaagattgtgaatcatcatcactcatccgggtcaaccaaacaacccaccatcatcccgatacgagcacacccccatcacatttcccagctcatcgccacggattgtgcagacagcctcaccacccaaattcaccaccggagcacaaaaatggccggcaaccaaatttacacacagcccaaccaatcacgcgcgcgtaatcctcccacggagctgagcttctccagctacacagatcaacagagagagatcgatccatggagcccggacaaacaaaccacccgccgatcttggaccacgaccaagaaacacccagccagaacagtacggtcaaaaaaaacaaaaacaaaagattcccctcaccccgagacaccgcgagggagggagaggagcgcgaggccgagacgggaagagcggatcagatcgccaccgcctccatcgccgatcgcctcgctcgaattcgtcgtcgtcgtcgtcgccgtggccgcagccgaggaggagaagaggagaagggacagcttcccgtgaggtgtggatggggaagaggagagaggtgggggaaaggaatattccccgtggggggaatctgcagccgtcggttgggcggccggtgcgatcctggccgtccgatcggtgcggcgcgcgcacgtgtgtgtttgtgtgacgtgccgaccaacgcggcgggtggtagtggtggtgatggtgagtcgtcgtttgcaaggcaccggccggcggtgcggtttactggactgggttggtttggtttgcggcctcgtcttttgatttatgtttatatttataagtcaaaactttaaatttaaaattgatttttgggttctttttatcataatttatttttagtattttttagataaaaaatatgtatatatgagttttatttataaattatttttcgtttgtaaatatgttgttttacgatggagtcttttggttggactcctcgcttggatagttggtttgatggtggatggatagtcgtcgatgtctgagtgataaatcggtggatggatggatggatgatggattgtgtgtggtatcgttgattggagatcggaagaggaacgggacgcgctgtgggggaacagttccatgatttcttgaggtgacagggctgtaatgacaagaggatttggattggtttcttggtctacgcttatgagcaatgattttacctgcttgatttagtgctatatgtacatatattactcagttttgtttgattatatgtgatgtgagacagtaataatggtgtgtttgaggagaagaagattggggagattggaaagatatgcaaaacgatgtgagccattagcgtatgattaattgagtattaactattttaaattttaaaaatggattgatatgattttttaaagcaactttcctatagaaaacttttgtaaaaaacgcaccgtttagtagtttgggaagcgtgcgcgcggaaaagaggttctttctcatcctatatcacacaaaagaacgcagcctaagtgtagtggtatactagcacgattgttcatgagaagtgtcgtttatacttaattacgtatgcgtactaccttatttttatctaaattttatagtaagcattaatatttttatcaaaggcactaaataaatttagccgtatttttaactcttcaagatactttaataactctatgctgtatatagaaaatgtatcacagtgataatataaaccttagcctgactaggatatcataactcaatgccacatatgataaataaagtataatggtgaatctctagtttataaatggcaaacacttattttgtattatccattatccgtatagtacgttatgtctccattaggccttgtttagtttccagaacaaaaacttttcacccatattacatcgaatgtttggacacatgcatggagtattaaatgtggacaaaacaaacccgattacacagtttgcgtgtaatttgtgagatgaatcttttaagcctaattgcgccatgatttgacaatgtggtgctacagtaaacatttgctaatgacggattaattaggcttaataaattcgtctcgtagtttcctggcggaatatgtaatttgttttgttattagactacgtttaatacttcaaatgtgtgtccgtatatccgatgtgacaactaaacctaaaatttttcccaactaaataaggcttagttgaagtttgaagcattttcatgtgccttttcttcgtcaacagaccaaccaataattccatttaaactttttttcacaagtttctcaaaaagaatattcacttgttgttcatcaccatcatatgcaataatacaaaaggaggaaaaaaaaatgaaaaacacatggctcaaaatacattcacgaatttgagagatcaacaacaccttgagaaaatgacccaaaaaagaaagaaaaacgtggtttataaatggcaaacacttattttatattatccattatccgttatagtctgaactttcatgcattttgactttaattttttaaaaatacccatgcattttcacgtgccttttcttcatcaacaaaccaaccaataataatctccttaaaactgttcctttttcttcacaagcttctcaaaaagaatatgctctttttatccatcaccatcatatacaacaatacacaggagaaagaaaaaaaaatgaaaaacacatggctcgaaatacattcacgaaattgagagatcaacgacacctacaagaaaagggttaattagatacaagaacgaaaaagaggggaaaaaaaaaacccgtcttcttccttgctcgtctcgcacctctctccctctcgatcgaacgaaccgacacctccgcaccaccaccccaccaccaacccgtgcccacgcacgctaacgtgaaccgcgacgaaatctcaaaaaaaatttcgcgtcaaaattcctcctcctccccgaatcccccccaaatccaaacccccagattccctcgccatttttccacccgcgggaggagtcctcagatctctctcccccccgccgccgcggattggcacgcggccaccgagatccttcggttcgtgagcgcagatttggttcgggggttggtcgtcgcgctgggggctagggtttggcggaattgatgctgcctaccagtcttgcttgacccgctcccggggagagatctcgccgcatggatcgcaagggcggcggcggcggtggcgggaacaggaaccgcactgatctcctcgctgctgggcgtcagaaggtactgaatcccgcgagctcgttgttgtttttgatgattttttttttgaggtttttttttgttttgggtctgatcgagtgttgggtgccatgggcgtgcagctgcagcagttcaggaagaagaaggagaagaggggtcctggtaagaaggccgaagccaaggcggatgcggcggaggctgaggagggctcgtcgaagtcgggggcagacgcggaggaggccatgccggagccgaaatctcccgttggattgaagttgctcgccggtgagggcggtgctagtcatcgcacgccgtttgaggtgaagcttgtgctccttctgggtgggtgtgggtgggggtttggatcagtgcttgttgtgtttaacactgatgtttcaatgcaggaagcggcgaggtcgcaggtggagcaatgcaatgggcaggggcctgataccgcggagtcctgcgatgtggataatgccgatgtcttgcctgtacaggagggtggtgatggtggtggtaatgcacaggatgtaggtgtaagtgaacatggcagtttagagcatgtaaaccctggaccaggtgatggcgaaggtgcaacgatcccggttaccggtgcagatggttctggccttcttatagaaggagctcagccagtggagatggatgttgatgagaaactgccagataatagtttaaaggaaaacacggagctgtgcacatcttcccaaggtgacatagctgatgataatggcgacagccaagcagaggaacaccagcaggtggagatgtaccctgttgagaggccgaccagttctgattccaaagaaattacagatatcattggtcactctcaagacattggagctggtaatactaataagggggaaggaagggctagagaaacggagattgatgtttctgggatgccatctggtgctgtggtagagtgtgaaggagaattgaatgttagagcttcacatgaggcttctgagagtacttcaagagaagacactgacaaggaagctgatgcactgggggaagaagctgctgttcaagaagatccaggtgtggcaaatgctacagagggagttgtcacggtagatgatttgagtttacatgctaagtcaattggggcagtctctcttcctccgcataaggagattgaccaagctttacttgcacgtgatatatcacaagacatggcgccataccatttagaggatatccagaggcatctctacttggcaactatgtcaagggattttctccagctgcagatggatgagagtgcagacctgaatacagatgatacaccacagtcttctaatgaagtcatcaatctccaggtactactagaagagactgaaaaaagcaagctagctgtctgtgaagagcttcagcaatgtagacatgagctctcggacatgaatactgtgaaggaagaacttgaactaactgtagcttctctgacagacagaatcaatactagcaacaataaatgcgaacatctggagtttgagttacagtcctccaaggagaacacacaacaaattctgaatgagttagctggttgcagagcaatgctggaagctctacagaaggagaacctggagctaactgcgactcttacttttgagaaagaagctagaaaggaagttgaggagcagcgggagcatctgtgtagtgaaaacaaaagggttttgtcaaatctgtctgaccttgaacttagtttagcttctttgaaagaggaaatgaatgatggcagtaatagatgtgcagatttagagtgtgaactgcgttccaccaaggagaacatggaacgtactttggttgaattagcaagttgcaggaattcgttggaaacactgcaaaatgataatttggagttatctgcaaattcttcctttgaaaaagaagcaatcaagaaacttgaggaggacaatttatgtctatctaatgaaaagcagggccttttattagatttgtctgaaacaaaggaggagctgcatctttcatatgccaaacatgagcatcttgagtcgcacgccagagatatggaaacatactttggacaacttacggagcaattaattgaagaaaatatttacacaagtaccagcgtcgatatttatcaaactataaccaaagagttgtatgctaagtgcaatgttgtgctgggtgaagcccggaatgcacatcaagacaatgaggcctgtctggactcatcagaaatcattgttgaaaatgtggaaagagaaaccacaagtcctgaattaattggacatgatgataatcagcgtccgcttctagtcgctgagaatgactcatgtaactctactgctttacagtcactgaaaggccatctgaaggtcgctaaaggtgatttgcgtgaccttcaaaagttagtagagaggatttcttctcggtctgatggacgtgtgctggtatcaaagctcattcagtcctttgagtcaaaaggaaatcaggaagatcttgggatgtctgagggagagcatgacaatttaagaaaattaactcaggagatgatatgccgccttgtggagaagttgaaggctatgacgtcagacattgcaaagacagaagaatatgtggctgagctgtgcaacagaatagaactttctgtgaagtttatgtcacagcatgaagcagaaatagagcatactgcagttcttgtggccaaaatggatgggtttgctggtaagctgagcaactacaaggacacaattgatcaactggttagtcaagttgctaatgtacaccaggatgcagataatcatgctggaaggctcattgatcaagcagaacttttgcagaatgatgtgactgaaaggatttccactcttgagaaggaaaggacgtccttgacagatgtgctcatggaagtaaccgataagctcagcgctttgagtaaaaatgcacttcctagtgatttgggtgggagtgaaggtcttggctctcttgctttgagttctgtggaatgcgctgctaagttagttcaaaatcttcaggagaaactagagcatgctcaaactgacaatgctaagcttaatgcttctctggtggagctcaaaactgcacactctgatgttcaagaaaggagtaaacatgcacatggaattgtcaagaaaatgtacatttccctgcaggaacttctattcaactcattgggaaatccagatgaatcaggtgtcgaatacaatgctgaagaaccaatagaagctctttttagtcaatatggagacattgttgagcatttgaagagtttattgcacgagcggcaatatttgctatcaaagaatactgacctagagtcaagattgttgagcaaatgtgaagaaactgaagctctcagcagttctctgacaaaaagtatgaacgattttagcttgctgaacgaggagcttaaatcggtttctacaagtagaattgaagcgcaggatgaactgcatggtagatgcctcgctatagcagaaaaaatggttcatcgttccacaagccattcatcaacagtactttcttcgatggaaatgtccagcaaggcaaaccatattcttactacattattgccatgtattgaggagggtgtggcttcatacattgaagaatttgaaaatatggcagaagaaatccgcttatcaaagatctgtttgcaagaaagcaatattattggccaaagttcatctgaaaagtggtcagtgtccttgcctgtgttgatcaaagaggaaattgtacccatattttttgacctgcagggtagaattgatcagctcagcacgttaaacattcagctagaaactgaagttccagtcctgagggatggcttgacaaagctggatagtgctctcgaaacttcacgtgctgaacttcagaagaaggtttttgaacttgaacaatcagagcagaaactttcttctgtcaaggaaaagcttagcatcgctgttgcaaaaggtaagggattgatagttcagcgggacagccttaagcagaccctgttggaaaagtctggggagcttgagaagcttgcacatgaactgcagtcaaaggattcattgctgatagagttggaagccaagatcaagtcctatgcggatgcagatcgaattgaagctttggagtcagagctctcttacatacggaattcagccactgctttaagggactcattcctccaaaaggattctgttcttcagagaattgaagaagtgttagaagatctagatttgccagagaattttcattttagagatatagtagaaaaaatagaacttctgtcaaagatggctgttggtgcttcttttactgtacctgatggtaataaacaatcatctgtggatgggaattctgagtctggtgcggccattgatagtataaatgatgaacaaaactcaaattcaaattcaggggcagaagaaataaaaataaaatacgatgagctacataggagattctatgaacttgctgagcacaataacatgttggaacaatctctagtggagaggaacaatcttatacagaaatgggaagaagtccttggtcagattagcatcccccagcagttcaggatgcttgaaccggaagatagaatagcttggttgggaaacaggctactggaggttgagcatgaaagagatgcattacatttgaagattgagcaccttgaggattcctctgagatgttaatttctgacctagaagaatcacacaaaaggatttctgaactaagtgcagagatagttgctgtaaaggctgagaaggaattcttctcacaaagcctggagaaactgagatttgacttccttggactctctgagaaagctgttcaggatgagtttgtcagagataatttgcggaaagatctagctgaactgcaggagaagttagctgagaagactgaggagagcaagctttaccatgatatggaaatggagataaaaaaacttatggatttagtacgagatgcattgcaggatgacagtaatactgaaatcccatcgggtgctggtgttggtgctgctgtgttgtgcttgggtagtctgttgagtagacttatagatggctataagactcatttgtcagaatcaactgttcgcagttctgcggagatggaaacactctcggaaaccaaaatatctaaagatgcctctacatcagagaggggtatggaggaaaaagagatggcattgaatactttgagtggtgagttagaacacactcgcaatagtctggccttggttgagcaacaacgtgatgaagctgtggagaagacacaattactaacaatcgaactggagactctacgtgctcaaatagaccagttgcagggagatggtgccgaacagatgaataggtaccaatctcttatgcttgaactagaatcaatgactaagcagcgtgatgatctgcaagagaaactgggtcaggaggagcaaaaatgcacctcattgagagagaaactaaatgttgctgtaagaaaagggaagggcctggtgcaacatagagatagcctgaagcaaactatggaagagatgaacactatgatagaaaaactaaaagttgaaaggaaacaacacatcgaatcacttgaatctgagagatcttcgttgatgggtcgattagctgagaatgagaagagcttgcatgatgcaacccaatatctgagtagattattaaattctctgagtacagtggatattggtagagaattcgatactgacccaatcaccaaggttgaaaatttttcgaaattttgccttgacctacaaaatgaagtgaagaaatcgaagcaagcaacagagctgcttctggctgagctaaatgaagttcatgaaagagctgacaacctgcaggatgaactggtcaaagcagaagctgcactgtcggaatcatttaagcagaacagtgttgtagagtctgctagagctgatgccgttcgccatcttgaacgtattatgcatatgcagtcacagacaaaaaggaaacagatagatcatttgatggagctgaactccaccagcagtcaactaagagagatcttctctgaacttttacatcatcttctcaacactttcagtaaggatgtggacattatcaactacatggagagctttgtgaaatcttctgataaatggatggacagcacgagtatggtggagatacccatcacatctaatcatcatttgtcaaatagcataagcagcaaggtaatttcaatgagtttttttttaaaaaaattgacatatatataaactcacaacacttcctatggtttagaaaatattatgctgttcagaaatgtcggaaatgatatcgatcaaaataagtccctttttcttgcatttactgctaactctcgtgagtttttcataattagataactgaaatgtgtttttttttaaagatgagactcacacttctttatcactctaactgtactcgattcaccatgaaaaaaatcaatatgttgctgtcaaaaaaagggaaatcaatgtgttttcttggagttgattttcaatacaattagaaacccagatgaccattatctttttattgctgctttatatgtaattatttgtggtacatgaaattctggtagtatttgacaactcataattcatcgtactacatgatattttggtagagttattcttttgggtttgcaaatattgctttctgatgtgtcagacttgctcctcgcagatggctcatattccaaatgttccactgaaaattacgttggacaatgccgatgaaacccagattttgcatcatcttgctactgcatgccatgctgtagctgattgtgtaaatgactgcaatgatctcaaaagtaggattcacgagcatggtttttcagttgaccggaaagctgccgatctgttcaatgttatgtccaacttgcagaacaaatttacttctcaaaatactgagttggaatctttgagagagaatattattgaattacagtcagagatcaaacagagagatgaggaaattttgtcaatgcgcagaaatttgagtttgctttatgaagcatgcactagttcagtttctgagattgaagggatgactggtattgagtctggtgaccatagttgttctgttgtgcagaaccatttatctgcagatgaccatataaaatcagtagttaatcaattagttgcggccataaagactactcagaacagtaacgaaggcaacacaaaggaactaaaggccactgttcttgaattgcagcaggagcttcaagaaaaacatatccaaataagtacaatcagtgcagaacttgcatctcaggtaaaggaagctgaatcttctgcgaagcagctatctgttgagcttgaaaatgctagaatggaaatccacaacttagagaaacactctgaaatgttgcttaatcagaagaagaatttagagactcaagtaagcgagcttaaagatatggaggcagtggcacatgatcagcatggaagaataaaggacttgagtgatgaacttagcaaaaaagaccaaggtgagccaatgcagttttctttaattgggtttgcttcagttagttgtgttttgtttgtaataacatgatattgttttcatgaactatcctttttcatttatgcttttattgatattttttttatgtattgtgcagagattgaaggtttgatgcaagcacttgatgaagaagaaagggagcttgaggtcttggagaacaaaagcaatgacttagagaaaatgcttcaagaaaaagaattcgctttaaagagtcttgaagtttctaggaccaaagccttgacaaaacttgcaacaactgttgacaagtttgatgagttgcatagcttgtctgaaagccttcttgctgaagtggaaaacctacagtcacaactgcaagagagagattcagagatctcttttctgcggcaagaaatcacgagaagtaccaatgaactgctaacaactgaagagagcaacaagaagtactcatctcagataaatgattttactaaatggttggaaactgcactattgcagtttagtgtacactgtgatagcacgaatgattatgaatgcactcaagttcctgtatatatggatatgttggagaagaaaataggatctctgatatctgaatcagatgaattaagggtgaccctgcaaagtaaagattctttattacaggctgagagaaccagaatggaagaattgctgcgtaaatcagaggctcttgaatcttctttgagccaaaaagattctcagatagggttgcttcgtcgagacaggacatcaggccaacctagcagatttataaacttgccaggcacttcagagattgagcaagtggtgagtgagctttttttatgtgtcgtttatctgcacaaagtgtatgaaacaaattaatattaaccctgctgacttgtatgctttgattccaacgcagaatgaaaaagtaagcccagctgcggttgtcactcagattcgaggggcacgaaaagtcaataccgaccaagttgctattgatgtagaggtgaaggacaagccattagatgatgaagatgatgataaaggtaaatttagtccctggtatacttaattcaaattgaagtgtccgcttcattctccgattgacctcctgtttgttatttcagcacatggtttcaagtcactgacgatgtcacacattgttccaaagttcactcgacctatatcagataggattgatggaatgtggtgagtacaatttcagttcttaccgaatactgattaaaggtgttttctcagggttcccccttcttttttcttaacagggtctcaggagatagattgctcatgagacaaccaacattgagacttggcgttttgctatattggattgtgctgcatgcattgcttgctagttttatttgaagattatatgtaaaggtaagtgatgctttttgtctgtcattaaaatttgagcgatatagctctgcagctatttacctgtggtgatctgtacaatgtgctcggtgaatcatattttattgcatctatgcttgagtttgaactttgcacttaactttcacttaatgccacctggctacctgcaggccctgctgttcagaagagatataattaagcagtgtgtaccttttatagttctttacactaaatcgaaagaaattcacaatctatttctttaactctacctcgtgatctaacccaaacactcatgatatgcactttccagtcaagatcttgtacaagtttgttcaatacaggcattggtgaagataaataattttaggtttgacatataagagttaaatatgagcaagattaaatggtaagctttctttaataaatgctctggaccaccgttaatatttggtctgaatatcgatgagttagcatcaaacttctactgatttgttgtatgctgtctccacaatccacatagctcatgacacatccctttttggtgtaactacatgatatttgcatgatgaagtcgtgtttgcgtctcagcaatatactaattaaattctttgaatggtatttttgcagctgtagtgatctcctttggtgagctactgtacagtagtatgtctatactccatagcaagctacacaaagaaagtagtccgcgctaatgttgttgattcttttggatacgttacaaggatactcgtattggcagctgcgaatcaacttcaggttgtcttcgagatgcatttgtcctgcctcagctggaatagagaactgaagaaagcagcagcagcagcggcaaagatcccctctgtaaatactctcatttttgtttgctctattctttgcttttagaaagatgtagggcataattttgaatggtagtagaatctacattatacgtaacagctttacagaagaatgacaagtagttctcaaagttttagggtattgggatggtaacagcttttcccccactttgaaagttggctccctgtattctctctctctacccaatatttttgtttacatgtgcaacacagcaattatttcattattattattaccacactgacctgccatggggagctttcatgtttttttctccctctctgaaactgcgttgagaacattattaccacaatgtgatgtggcctgtggggagctttggcattttcagtttttcttctgtgaaagtgaaactgcaagaagaattattatgtcggagtatatcgatccgaaggccagatttgttcggtttgaaggaattttaattcataatataaatggaaaaagtgaagaaatatgaataggaaagtaaatattcgtttgatttgtacatattaatcgtgcagctcagccaacattgatatgttgtttagtccatgtagtcccaaaatatcccaaaatgagatgttatattttagaattaaagcgagtagaacacttcacatttgatccataataaactattacggcgtaatgggcgacgtagaacggaggctgcattcccgttccggcccatgaagtcactgactttgaggccccgttacgcctaatgttggccgtgggggcccactagtcagcgtgttaggccgcgggtagggttcgcccactagcggagacactccgtacgagataggcacgcgcgctcatggagccactcgtgcgatcccccgtcacatcgccgccggcgatcgccggagcagcgtcgccatccccgtcccgctccctctcccgcagaagagcccctccggacgccgcggccttccctaagccctgggtgatcccttcctccagcgtcaaatccgccgcgtgcttgcagctgcagcaggcgcgcgctccccgccgatgcgcgcggctcctcgccagcgccgccgaaggaggacgaagaggggaggagggctctccggcctcctccagtgatgcggatgaccaggcggaagccttgcccttcctcgaggtaggcacactctctctgactcgagatatttttggatgaatgaaatcaatggatagctggctatgtattggctgggtttggtgacattttagttaatttaatcagctgggaaactggatgtttctattttattttaattaacaggagagtaactgatagtttgatacagattttgcttgttataaggaagaacttagaaaattgcaaggctaagaaggaagattgattagttatttaatgtctgtgaggtattcaagattccacgatagatgattgttttcctcctttttataatatattgcaagagtgatagccatcatacgcaaacaagtaaacatggtgagagtggtgggagcaactctggtggatctagagccggcctattcagaacaccaatttcagggggcgtacacactgcgacttctgttcatgatttacccccaccggctcgagctgttcgcaatctgatggagcaggtatctgatccaaatactgtggactcttaaatacgatctatcagtagctagtaatcgtgattcatgcaaaatgtttgggaacttgggtttatcataccgagccaaaaaaaaaaaaacttgatagattcaccacttgtacaaaaccaggcacggtttgctcatctgtgtactgtcatgtctcggatgcatcatcgacgtgcaggatacccgtttggttctctagtggattttgcacctgatccaatgggacgtaagttctcaatcatccttttttgttgtatacaactttttggataccgccccttatgaggattgttttcccccaatttctttatgcagaccccattttttcactgtcccctttagccatccacacaaggaatcttctggaagatccgaggtgcacagtcgttgtacaggtaattttgatgtatttcataatcatatccaggttattttttttgctaaagcttctcatctttctttcttcaggtgcctggatggagtggactgtcaaatgcacgtgtaacaatttttggtgatgttgttcccttgcctgctgacctgcaggtttgtaccaaaactgctacctgctcattaattccttatgatgccttgatatcattgttggctacgttactctatttggggtgtgtttagttcacgccaaaattggaagtttagttgaaattggaacgatgtgatggaaaagttggaagtttatgtgagtaggaaatttttgatgtgatggaaaagttggaagtttgaagaaaaaatttagaactaaacaaggccttggtaaattgacttgtactgaagtctgaagtatggcttttttttcactattccagtttacctcattacctggtatctacctttcttgactctccaaattgagctggaccactgggtagctcttacgttttatcctagctgacatgtactctctggaaccgtttcactgaccaccattccaattaaaaaagttaaaaagaccaaaaaaaaaaaacacccagacatgagctatgggttgtacctgaggtttttaatctccaagaatgtgagttatatgatacaaataactaacatggccaacagagtctgaaatggaagacaagcaaaaactatttacatgtgattatctctgccattatttttcttttcttcaggtcttggttgattttgtcaacggaaatagtgacttgaaagttattttttttcaggaatgggctcatcaacagtatgttttgaagcaccaacagtgggcatcccatcagtggggcaacttttactattacaaaatgcagacaataaggtagtttttggagttgctacatggataactacttctctcaatatttaattgtggctctttatttagcatgtgggatttcacaaagtttagtagcttacaattgtttgtggtatctattgattgacacaccctttcataacatgctatcgatcttcttctgtggttttcataatgtttgtgaattgtgaacattccagtgacatatatttcattggaggttttggcactgttgcttggttagatgtgaaagaatacgaggctctcaaacctgataagattgcgactgatggtggggagcaaagtttaaaggtaaggctatgattctttgctcaagaataacctggggagtttttttctctttttttggggaaacatgtatggtttgcgtattcagcctttagactatttgaaagtcttcgatttctcttgggctctttgcagaagtaattcattgcatcgtttattcttttcatcaggaacttaatgcaatgtactcaaagcctttgaaagagcttttatcaaccgaaatagaggtagatgatgcagctcttatatcaattgatagcaaaggtattgatatacgagttcgacaaggtgcacaggtaaaatatttgggaacactacttactattagtttctggataggctacttcattttattgttataatgatctgaactgcatagatctggtgcactttacatagattcgcactgtaatgtttgttttcataagcagtaggcggttcttatcgtgtctgttatactgtcattgatgccatatattcctcatgcttttgttgtgggattttgcagttcaacatccagaggatagcctttgagctgcattacagcgtagaaacacttgaagaagccaaggaagcgattaggaggatattaggcaaatcaagatggcatgccaaattttagacttccttcaaatctgaatgatgaattcatggatggaaactatcaagcgcctgaatcctgtaaaatatttgtatatactcatgtaatttttgactttgtggtgtgccagatggaataagggaattccatttcactcttgtgttacaagggcctaaaaggcctgaagactaaggatagagtcaaatgttattagcttctgtacagtcaattcacttctagtgctgggtttgataggaaacgaagtacatgcagctaacaaaatgtaatatccaaaaatggtttgacaattgagattatgcaagtctattttatagatgttgctcaggtttatgacatgtcgagttcaagacgcgttcgtgaaaaaaaaaacgttgagttcaagacagtgttttcgaactgttcaatttccttgaaacttgacaacagtttaaactttaaatggagctgtataaaaccaatgaaacctgatcgtcccccacagaacaaattgtaccggttgtcattgcaataattcattagttgccagtaatagagcagcaaacgaacaaagaagaaacaacttttggcactcaaacagttcattcgatgaataaaagaaaaaaacttagctcaatgcgttttagctttagatgagtaatgcaaaatttcgcaataattttttgtacatgtatctttttctaatcgagataaattccataaaaccataggtgtaaaaaaaaatctaaattatacaaaaccacatggtttcgcccgctggacctaaaattatgttgaaatatactactccctatgtcttattataatatgaaacggaggaagtagttattttaatttatcattaaaatgttgtagtcatgaatgctgaatctttttttttatttttctatagtattattaaatagactagttaacgtcgtggttttacgaaagttaaggaccataatagcgtattaccatggctatgtgcaaacatacctaaactaatacgattttatgtaactttaatcacaacatctaagttctatgaaatttactataagaagagtaagggtctgtttagttcgcgaaaaggaaatttttgggtgttacatcggacgtttgaccggatgtcggaaggggtttttgaacacgaatgaaaaaactaatttcataatttgtctggaaactgcgagatgaatcttttgagcctaattaatctgtcattagcacatgtgggttactgtagcacttatggctaatcatggactaattaggctaaaaaaaattcgtctcgtgattttctccctacctgcgcaattagtttttaaatttatctatatttaatactctatacatgtgtccaaagattcgatgtgatgtttttgagaaaaaaaatttgggaacaaaacagggcctaaattaaaaagaaccagataataatctaataaactcatacagttgcaaatgaagaaagtaaaaacaaaaaaaagaaaaaaaacatttcacactctatccatattgtagcgtgtcaaacactctgaactgacacgtgatgacttagctggaagcggcacggacggccacgattcgcccgcgaaaaaatcctcacgacgcgctccccgcggaaagaaaccgagcattttccgaaaaaaagaaaagaaaagaaaagaaaacaaaaaaaaaaaccgcccgcggctatacacccgagactcctacggatcgaagccctagggtttggtctcgcctccatccccatcgtccgatccgatcccccgccatgagcggccaccacgaagctaagccctaccagccccgccgcggcccggctcccgccgacgaggaggccgcccccgccgctgcggcggacgaggcggaggcggaggcggaggtggaggctatggagcggtacgagcaggagcaggagtacgaggagggggaggagggggaggaggaggagtacgagggcggggagggggtccccatggacgccgacgcctccgccgcggccgtggcggggatggacccgcacggggagatggtgcccgtggccggcggggaggcgggcggcggctacccgcacgtggcgtcgaacaccctcacgctgtcgttccagggcgaggtctacgtcttcgagtccgtttccgccgagagggtgctgtgcctgcgccgctcatccatgatttcagtttttttttgtgtgtgttttgcgcacctgaattgctcggtgaatcggtgatgagtttgaattacttgtgttggcaggtgcaagctgtgctgttactgcttggaggaagagagctagcaccagggtcgggttcggtaccatcatcttcagcggcatacagtaaggtgaagtcatcgctgggcgaattatggtgattgccagttgagactattttaaattgtaatggtgcttatgtgactgtgtgtactctcttatgcagaagatgaattttcctcaccggatggcatcattgatgaggttccgggaaaagagaaaagagagaaactttgataagaagatccggtatactgttaggaaggaagttgcacttaggttagttagactagccttttaatatagccttcttttccctgtctatattctagagtatttgttatgttgtgtatttagtgttagcttattaatataatccattttctctgtttaatattatgaagttttcttatggtggatgaacttgttattgcatttgattttgtatatttggcaatgtgaattttcctttttaagttttatgagatagtagtaattattttctatacatttacaggatgcagcgtaatagaggccagtttacatcatcaaaatcgaaggctgaagaagcaacatccgtcataactagttcggaaggttcgccaaattggggcgcagttgaaggtcgacctccatcagctgctgagtatgtattcaaactattgtacttattatatctttatatgttcatacttcccattagtattatataaatgcatgaaaatcattacaaccatatttatatgagggatggccatttctttatgtagtaaataagtgtgccattcatggatcctgatttcccacctgggcaactgaattgtgttgtttcgaaaattcatccataattgggaaatatattcaatatgctccaattataagaaaatcagtttccattgcaacacatgggtgcactgctaggtatatctttgacctagtaaggatgcattatctcatgctcgcactgtccacagggacattgggctatcatacagagactttgtcgttttctctcagtcaccaacccaacctccaccatgtgccatgcagcatgcacgcacgtcgctggagctagctagctagccattttttaattgaacacttctgggtagtgagaactgtgaagccttgaatcaagcctttaactcagtttgatatttgaaaatttacagcacaactatcctgcatatatttcaattgtagttgggtgcaaaaaataaatcaaaatgcatgggaaacctccagcggaaaatggatcaatgtatacatctttctagttcctgataaaaaaaatgtagcatcaatttctgtaccaggcaaggtagaagcacgtgattctaaatcttgactattcaaggtgtttgccatgtggcgaatgtgacactgcactttcgtactgtagaaggtcatgcagcataaaattaaaaatttcgaaatgagaattgtctgacttgcatcattcactgcttaccagatctagctcttccatttcagacaggtttttgctatttggctgttgataactaaaaaatgatagttggtcttgatcaattgtttgccacccacatgataatagatgcctcttgcctcttgcacctgttgcttgtatatttgccttatattttctagcttcttttgcttcagaatttgaaacttagttcttgttgtgagagttactttccatgcacaattctttcaggtgccatcattgtggtattagtgcagcgtcaacacctatgatgcgccgtggtcctgatggcccaagaacattgtgcaatgcatgtggacttatgtgggcaaacaaggtacttccaatctttattgcactgcaccagtatctttctatacattggtgctaattgcaacttctagaataggctgtatgttgtttgcataacctttgttgcatcgagggtgtctccttcaatattaatataatgaacaatttttgcctttctagagcccaggtactgtaaaatttccccttttaccatatgctaagtttggtggtaaaagttatactgttctagcttgattgttgtagctctcagggtggatcttttgtgtgatctgttgagtgtccaatgcatcccaaatcacagttcacatgtatggtcccatcgtgaaagttggaacaccagtaaacagtcatggaaattgtaacgtccccacccaaaacctccattaccccagtggttcagtgttggttttaagttcttagcttgcagacaagttgcatttagcgtttttagggtcagtcttggtgttattgacaatattctgctccaatttgttcgtatttcgtagggtacgatgagagaggtaacaaaaggtccccctgtgcccttgcaaattgtgccagctgcaaccaatgatgttgtaagtcactatgtttgcacttcattcattcagaattttagattgcaaattttatttatagatttacccctcatccttttctaactcaaatttagcgttgtgtaaaaccattgtttgggcctgatgaaattggcattagagtgtaagacatatggactgatgaaatgcatccttagggtgcacttgttctttctttataggatgaggatttgtgacttgtgagcacgaaacaatcatgtattgcagtttctagaaaaaataactgttctagagcagtgaattttaaactgggtcagtagtcttactcaaaatgtgaattacccgtgtttttcagcagaacggaatcgtcgaggcaacaggtgtcgagcagcacaattctgcagtcgaggaggcagtttctgctgcaaatggccatgaatcgcagtcgggagtcgcgtgatgcttgagggttcagacttgagaaaaaggaggaggatgcgtatcaatcaacaatcaagtagtcatggtgctcaacaagttaaccggatgtatgatatgaccggctctaggattcatgtggttctgcaatgccggtctctccgagatgatatatgcttgtggccggctttttctatgcttgtatttgagttttatagctttgcctttggcagtagataaatggacgagttcagcttgagcgcatgtgacatattttgcattttactctcttgtcagatgtaatcgttgatttacaggtgacactgggcaagcaggcaggttaatttcacaatcgcagcatcagtgcattgtctgattttgtctcgtttctttctcctacttagggttcaacttttcgattgagccgacaaatttcgatccaaataacttttggttgaattttatcgttttaaatttaaattatcgagaaccatttgacacgaatctactctcgtcccgcgtcgaaccctcaaaatttcgtggttttccgtttttggattgttatttgtcgaaaacgtaaacactgctaagtgcaaacattgcaaccgatgctgggcttcgcagttagtttctctgcgcttgtagcgtgatgcgaaggccgttggatcaaggtttgacggcccagaacgtgacacgtgtggcgcagatttgcaaaagagccctcgcgatgatttgtattgcatcaggcctcctcttcctcttgtcttccatccccaccacgcgtgcgagacgagaccagcgcgacgacggccatggccgcggcggcgacggcggcgggggacgaggagttggagtcgctgctgcgaaacttccaccgcttctcccaggtccccacccattctctccggcgtgtcgcgagctcggcggttcgaactcgctctgtgtgtcctcccgccgtctcgtttttgggttttaggattagggttcatcgagcgaagtgctgatcacgaatgccggtagctgcttccagtttcgatgccatatcatgccaattccttcagctcaaatgcatttaacccaccagctcaagttcgggtaggagattagtaccgcgtgatctctgcttccagggctcgaatgctattccgtttcaaggaacatgatctaacaccctagcatttccaaattccgatgatacactttgatcttctatcgctgttctgttgtttcgaacaggggtacaaggatgcacttgtggaggcccaggctttaagggtgaactgcagctctgaatccgagaggcgtcaggctctcgagtcgcacgttgcagatctcaagagtggttagctgatatttgagagctgttttacaagcttaagcttcagtttgtgttgccttttatgttaatgtgaatactgtgtggtagctgatgatttgtgttgcttgttaaggttgaaacaatgagtgagttaataaatgttttgtgctgtgcagataatgagcgattgagaaggctgtatactgaaactttgttcaagttcaccaatcaggtctggtgctatttactctgtgcaatcgtaaggaggatggaactgtactgctacaataatgtgcagcaaacttagttgatctatttcagtattaactgagatgcacttgataatgcagtggcaaggggtgtgtggtttcaaccctaagatcccgtgtttaattcccaaaatgctcacaatttcttcttagaaaatgtttggagggacgtctctccctccaaatttcgttttttatttgagtgttaactggttggtatagatgaactcacctatcgacaccatttcacctgtgctgttgattgtctggtgctttcaatactacattaaatctcaaattgtgcaacttagtctagttttttatttttctacttggagtctggaaactggctgttagattgttaacaggacagctattgaaatggttatatgtagcacattcatgtctgtgaagcactggattagttctgaatttctgatgtgcttgatattcttcagatgaaatttcacacagagtctcgtaatctgaaggaagaactggaaaaggcaaacacgagattgctatccatggaagaggttaagaggaaaatatagtgtataattagtgtttccagtcaatccatagaacatatagtgtataattagtgttcatttcatgtaggagtataagagggaaatcgaacaacttaagcttggcagtgaaatgaacagcaatgacctggagaacaagctcaggtaaagtttcctttcaaggagggcagctaattgcataatttctatatgcaattaataaatctaacatctgctgtaaacagctgcgctgttgttcagcaagcaaccaatgaagctgtgataaagcaactcaatctggaactggaagctcataaagctcacattgacatgctaaatagcaggttggagcaggttactgctgatgtgcaccagcagtgtaatgctctaaatcctttccatgtgaaagattaaattcctttggaatacgctctctagctcttatgatgcacatatttcctggctcctactatagataaaaacgagatccaggatctgaaggatgtagtcattgttgaacaggaggagaaaaatgacatgcataggaagcttcagaatactgaaaatgaatgtaagttcaacctgtactgttctgttgaaacacacaaatcttgttctcccaaaccacccatatttcctgtgtcaattgaaacagaagaatgaaacataatgcttcaccgtgaagaacatggatttgaagaacagaactggagctaacaaatttcagttattcgacgacacgtttttgctcctttcccctagttggttaacccttaacaggattgttttgtcatggtgcagtgaggatcatgaagatgaagcaggcagagcagcaaagggattccatctcggtccagcacgtggagacactgaagcagaaggtgatgaagttccggaaggagaacgagtccctaaagcggaggctggcgatctctgaacttgactgctcatgagagaatgaaccaattcccctcttcctttgatgctctcacgcactgtacgtaccaccaaaccatcagaggctagaaaattagatcatttggctggctgcaagtcccacatgttcactgggttgatctaggactgcacattcttcagttaaaatgaatgcaaccaattcagtcacttattgcagctttgtcctctaccaagattcaagaatcaaggcagttcatccctgcctgacatctgatatcgcaaatcttctcgtgccagcctcctttttactcagagccattcacatttcatttattttcttttgcaatttgctgagctatgctgcacttgatcagttcagtggcccgcagcttcagaggtctgcagctccaggatgcaacctgtgtattaatcacagtgcaatttttatactgacaaaatcgagggccgggctgtgttctttcctcatggatgggaacactaccctccaacatggaaaatagagtagttcattagcacgtggttaattaatctatgtggacaactatcctccaacatggaaaatggagtgccgggctttaggttttattttgtccacatagatcctctgagtatttgttttggtctaaaatcatccttgggcccacttaatatgccatatggctatttctagtcaacaattctgttaaaaaaattgtcccttttgcccttaatttatatataactatacactagaaaaaagaaaaccaaaatgaataaataacattgtatatgtacttcccattatttcaacatgcgcagatgaaacttgagcctaatagctatcgtatacacttgcaagtacataatttatttttgttttacatgaattgctatgcattatctataaaaagaattcattgcatgcaattttttctcttatatatgtgatgaatggagaggggggaggggagggggtataagtgttatttatcaagagatttgttagttatgtgggttcaaggataagtttaaatgaaaataaaaactcgaaggactaatatggacagattgaaatattaaggattaaactgatccttgcatgaaacttggaggaccacttaggttattcacctttttttttgtgttataaattgttggaagcattagtagataggattagtttgaaacctctctataattaatttggtggtgtttttgttagaggaaacttctaggttttgtttttttaatggaacttccatgttccgtcagggtagagagatggtgagaacatgttttgcacccaagataagaaaagctcggcgagcgagtatgaaccctgtcgttcctgtcggccgctgccgctgccgcccgtcgaggccttcggtgccgccggcgggccctcctggcgctccctctccctctctctctagggatattttgggcacaaaaacctccaaagtggcatttcattcagtaggcaacatattaagtggcattttatccgaacccaacctagcgagtggcatatcatctgttttctcgttaggtaaaaagacagtaaggtaagaaaggaggttcagtttttcaaaggatggttgtttgtacatgcttgcggattcctattcagaatataagagtgacaaatcggagttaagttagttaccttatcaaaatttttggtagcattgatagtggtaatgaagtgaacagcctctcgtttcttgatcgtatcccttctttctataaagttaagatccaaagctgcctccttaattcgccatgtcatcaacattatatcagccgttggattctctgtaggtctccagatcaatggttcagcaataatgggccatcccatcccactcatgcgcctcttataaatccttctttctgttggcccaagcccatagccttgccaatcgtcacccatttaatctccctcatgactcccttggtaaggtgaaccatgggccagccggtattaatccagcagtgagttcttcactgtttccttcatccgcacaccgcagcaaccgcattgcctcctcccacccacggcgctgcacgtcgcaccggggcctacgacgcccatctctccccctcccacgctgagccgagcgcgccttgcagcctgtttgcctcctcggcgtgtcaggaggaacggaaccgtcgatgcccataaagagcagacttcatggctgtcaaaacttccacaacattcaaaccgcctcccagcttttaactgtcgaccaccgcatggactcctggagctggacggaagccaatcatctggttcgcctcctttgctcaaaactgtttcccccagtcttccaagaagcaaatcaagagctttaactcagccgcctacgtattgggtcgactctggttgcttggatggaggtggataccatgagcgtttgtgttctttgcttcctcgcttgagcacgatcagtggcgctcaggttgtttgctccccaaacagctgaaccgggttaatctattctgaggtaaattccccgaacaatgttttcccctatttgataaaatgcttatttacacgcaccatatatttcaactagacaggtagcaccagaatcacgattcacttttgagtttccgtctttctgatcttgagcaaacaacctttgaaatgtgcaacgatggagccgcagaaccacattaaggtgtttgtatctctctatcagtttgtggacagctttatctccctacatcagtattggtgcagcaccagctattaataatctccccctctttctttcccaggaatacatatattaaccaagagatatattgttaagaaatgataaatcactgaagcttttttaggataatttcttggcaacacaaaacccctcagaattacaatatttactgtatatccaactacattgtttagtactataacaaatagtctaatatatatcagtgaagtaacagatctagctgtttttttttaagaatgaaaaatctgaaatatttatatcactaatacatgtgattgccattcactgagctcgcggacgtcgtcctcgcggtgcaggacgtgctcgccgcagagataccggctgaaggccaccgcctcctcctcgtggtgtcgtcgctgtgcaggacatgcttgccgcagaggtaccggccggaggtcgctacctctttctcctggtggatcagacgtattgccggtggatgtggatggtgatgtttggtgccggactgctggtggatgtgaacaatgaaaacgacataaacgaacgtgaaacaatgacaagagaaaagaggaacgatggagaatgaatggatatacagagaagatgaagagttgaatcatcaagattatagaagaccaagagtcgtgacccttccggaaacatcaggtggctttacactttttcattttactccaacgtaagattgttttttatattttagtccttctcaagtgtgggagcacacgcacgaatcacgctgtgccacgtggcatcctaatcgctcgataatttgcacggatttcgatggtaagggattgattcggcgttaattgaaaaaaaggttagatgaggtgtcgaaaaaggggcttttttcgtgcgataattcctcttaataaagccggcgctatgtattcattagaaacccctttccatatacatcatatgcttggtatccttacagagtaaaaaattaacttggtatgacaagaaaattttgactgaacatatacatcctcacaatctataagaataagttaaatttttattggcgcttgctccggacattgacagtggcgcgtcatggaggtggccgctgctgctcctccatatccatcggagtctaggctcgccgccgcggaggtcgcgccgtgtgcgtggggcagagtggtggccggatccgccgccgcctcgcctcccgcccgcagtcgctcgtcacagtcgtgtccgccattacccgtgcaagaaccacgctggatccgccgtcatgccgcccgcatccacatcggacacaccccagcgcagctggatccgcgcacgtggggtgcggagcggcggccggatccgccatctcctcgcctcccacccgtctatcccttgttcagtttttgcacagcatcacatatatgggataaagatggtgatcaaactaaacattaacgtgcgtgcattctagatgagagtgaaaatgatcctacttagaaaggtggtacaacagaattcagatggtatgtaaagtaagtagtaatgcgcaagtagaataaagaatccaagcttgccacaatcttacaagcataatatagctctctcaagaagaaagaatcaaaactacggcagactgataataactattaacaagtaatcatttcagaactgaatacatacatctgtgctcactttcttgaccaatacatatacaggtggatagtgcagaactcagcccactggagacactgttggtgcatagttgcaaacacgatcaagctgagagttgtctccctgctgcattcggttgaacaggtagcctgcaataaacaaaggcaaaatttgcgactggacactaaaaacatgtaattagctaatagacatcgtaagaacgcgaatttgctgttggacacaaaaaaaactggtaattagctaccagacactcgttgctttattttattatttccgaaggaattggagaaaaaaaatactcattaaagacaattttacccttggtcaacaatgtaaatgctacaaactttgaacgtcagtggattagatttgacacaaacattagggacactttggccactcgaaatatttactatacttcaattagccagattaatcacttcctctctactccagatgttaatcccctttatgttcgattaagcaataatgctgtgctttccaagttacactccatccatctcctctctacatgtacaaactatctgaagtcaccactctcacctgttcgacgtcgtacgacctcgtcgtcctcgtcgtacgcgctagctatggccacgcgcgagccaccgcgtcacgggccacggcgccacccggctgtcgtgtccaactccggcgaccaccaccaccaccaccaccagcaacctttgcagcttcctcaatagagtcgtctccgcttggctcgtctgcgccgtgctcaccttgtttctcttcaacctcctctggttttaccctgtcgacgcgctgtggaacgccgcgctccggtccgtcgtcacttccggcaaattaggtaagcatccatcaatggcaggaggaggggaggaggctagatgtgactactgggaagggcggtgggtggcgcccatcgtcctggcgttcctcctcctcgctgtccgcctcgcgctgcccaagaatgcagccaaggaggtggcctactcggacctcttgactggcctccgcgcgggcgacgtcaccgccgtcgcgttcgaggaggactcccgccgcatctacttccacagggccacggacgatgtggggggggggggggggcggcgaggacaccgacgccggcacgggcgagtcccgcagaagcgcctcggcggcgaggtggctgtgctacacaaggagggtgccgcacgacgaggggttcttgttagggctgatgcgggacggcggggtggactatcggtcggcgccacggctggcggggaggctactggtgtacatgctgagcacgctgctcgcgctgtgggtggactggtggagcggcggcggcgggcgagtgctgcgatcgccgatgacgggcgaagcggcgggtgaggctgagaaagagagaaaaggataaggaagaagaaagaaaatgaaaaaaaaaatcaaagggtagaaccgtacttacacagctatttctctctctaatttttccaaatataataaaataatctcgcgggtgtccagcaatcaattatcagttttttacggtgccctacaatataaacacatattttacagtgtcttctaactaattacacgttttttggatgtcctatagcaaattttgccgataaagaaggcaagcaaccaaacgaacaagctttctggtcgctaccatgccatgatcacgcgtggatatagataatcacagattgcacataattcttgcaagaaataaaaaaaatgctcgtgcaggatccatgcgggagaaagggggcgctgtatccgtggacgcgccggatccgtgcgcattttgtagacgatttctatgatgtgaatccataatatatataccagattaagtctacgtcgagttaaaaaataacgcaatgtgtaaacaccgttggatcacaagatcgagtatgcaccagatcaagtgcacgtgaggcaggttgggttgtgggtcgctgagttaaaatttaacttgcacgtgaggctgggtggttgagttaacacttaattgtgtagcttgcaccagattgagatcgcgtgagggtgggcggggtggtgggtcgctgagttaaaagttaattacgtgggggtggaacagggtggaggttgtgtgtgttgggcgccatctaataagtagcgccaaatagtagttcaatatatacatattgatgttaatgaatatatatatatatatatatatatatatatatatatatatatatatatatatatatatatatatatatatatatatatggattcattaacataaatgtaaatgtgaaaaatactaaaatgatttacattgtgaaacggaagaagtagtactgaactactgataaagcatgccaattactgggaggcggtcgcccgtggtggccgtcgatggacggaagaaggattgagaaaggagaggctatgtttgatatgttgtgacaagtacgcggacagagagctagcccgcgtcttcctgccgcccgcgcctccccgttgaggcctgcgcacggccggtgcacgcccgtgccgtggagctccacgagtcagaatcctctgtagtcaactgcaccgtgccattatcactggcatgtgcacatgatcccaatccgagctccacacgggctgccgcagtgcttcgccactgcaaccgtcgcggcgccgtcctcctcctctccgcctcgccctgtcgacgtttgcaccgtggagctccggtgggctgccactgtgcttctccaccatggccgtcgtggcaccgtcctcctcatcctctcccgcctagccccgtcgacgcctgtgcaagctcgcatctcccagtcgacgcccgcgcacggccagtgcacacccgccgaccagcctgggcagagagagagagaggaggaaccgagaaagagaagagaagggagatagatgagtcagcctgacatgtggggcacatgtgggtcccacattaaatcagctgccacgtcggacaaaaccggtgtcaaaatcaccgaagaatttattgtgaccggttttaattagttaagagatgccggatatctggttttgcggttgggggacgattttttaactcgatgacaagttgagggaccttcggtgtactttttcctctggaattagtcacatatactaaaagcccatgaatgatttcggcccagggccaatccgtacgaattaggctgccaactggcaaggcaagatgctggcaagtggcaattggcttctctctcctctgcctctgcttcttccccgcctctcttgcttttttctctttcgtcgtcttgctcgcgctctcccttctcttccaagcccccccctctctctctctctcgtgctcgtcgcctcaaccacccccaaaatccccaaaaccctaggcggggctcgcggccgcgcctcctccattccaatggcggacatgctccgcttccccgtcgaccccgacctccgctctcctcctcctcctccgccgcctcctcctccacctccgcgggacgacggccatcgcacgcgggtggacctgccgctctttcatccaccgcccccgccgtcaccaactccaggactcaagcgagatcgctcaccagagggcgagctgctccctctcccacccccgctcggctcctcacgccccgaccgcctcagcgatcacctggagggggccgccgcgcctccgcgtgctgagatgaggagcgccagccccactcctacgtccgagaggtcgccttcaccgccgctgcgcttggacgacccggtcggctgccgcagtccaccgcgcggagagaggtgaggcgcgagagcgagacgtttcggttcaccttttgcttgtctcgggggttttgggttcttctgtgctcatgctttcaaactattgtgtgtcctgtgcgtgcgtgcacgcgcgcgcatttgggatttggtgtggtgcaggttcgcgaccatcggcttggagaaggagcgagccagggaaatggacagggacacttcatgttacgctcaatgtgagatgcatttgatgaacacttctattttgagcacaagcatttcgaagcaaaatcgtgcactgcgacatgtgtttgcatactatttgtcaaaccagagtttcggttgttaatttgggaattggggatggattgcttagacccatggaaacccatcggttttaggtgcttgtcctgattgctcaaaacctcttgtgtcaaaatcgccctgaaggttttgggcacttgaccctgcgtagttcagtataatttgtgtgtaattcgtcgattattaccgtgttacctttttcaagcacgatgatcgcgtattaaacagttaggtgtcttgtactcttctatgatttcataatactcaggtgggctataaacttaatgcgatcactatgaattgcacacggcatctttgtattagtgaagtttaaaagaactaagccatcagtcaacattggcacactagtagggtgactatgttgttagttggtacctatgaactttgattggtagcagagtagacttcagtacttgtcaatttacttgagaacaagaaagatagcgaattggtgtcaagtgtttacattattcctgtttcttgctggcgtacctttagtcaattgaaattcttggtatgaagggattgacgttgatctattattcattactatgtctgcagcttcaaataaaagttaactttaatgttcaaactcatactctatttttttctcattagcaaaatttattagatgcgtgcattaagacatgggccagagatataaaccatttccattatctcaaaagacaattcatggcccttcatgtgagcatgtctcataagaaaatgattcgtttttaggagatttgacacttattgcttttcttttagattgcttcaactatggatacgatggcctctgtaatggtcaaggtaacgcccagaggttggtagttttttttttctgtttggtatgttgctgttgctattactttcaaggttgcaaacgcagtgttgcattttgttgaacttttacttactaattccgacatctcaaaaggtgatgcttctgctgttgtttcattttgatacagtgatccaaacgccaaaggtggaatgacagttgaggagcaacctgtaccagtaagaaactatggactgtttaccttgttacttttcattgatatgcctatcagtattttcttgtttgtatggaggaagcgagaaacacttgtatttttcttaataatctttgaaactgaactaatttatcacgagtctttctttgttttagtaggtttacattgcactggactattaattccttcctcatttttccctattaagttacttattgccatgtttagctgtttgtgcctatcgtaaaaacgagctgtttctttgggattagtatgaaatgctttcccatgtccatgtttgtctgacagataaatagaaatttgatccataatttgttgtattcacttgtcagttgtcatgagtgaagctgttttgtagatctttcaccttttctaattccacattagtgtagtagaatgcaatcttattaccaacaactgattttatccccctgaaaagatataacgtactagtaatccacaacaagattttactcttgtaatatatttgtatgccaagtcttgttgagttgtgatccaaattcatttgcacttaataaaggccagcttctgccatagcggagcgaaggcccgtcgccgggaggcttgggccggagcgtcatcccttttaggattccaccatatatatacttcttgtaacccgtcgtgcggcgatgtaacctcaccccagatatagtgaagatattttgctggctggcgcccgcagtttttctctcctgttttgggagggttttccacgttaaatctcgtgtcttctgtgattgatctattgttctttatcgtttgttcgcttatcgtttcctaacaagtggtatcagagcttgttcccacattagggtttcgcgatggcgtcgatgaagtatgatctaccgctgctagactacaagacgagattctcgctgtggcaagtcaagatgcgggctgttctggcacaaacttcggatcttgatgaggcgctagaaagctttgggaagaagaaatcgactgtatggaccgctgaggagaagcggaaagatcataaggctctgtcgctgatccaacttcatctatctaatgatattttgcaagaagtgttgcaggaaaagactgctgcagaactttggctcaaactggaatcgatctgcatgtctaaagatctaaccagtaagatgcatatcaagatgaagttgttctcacacaagttgcaggagagtggttctgtattgaaccacatatcggtcttcaaagagatcgttgccgacctagtgtcgatggaggtacagtttgatgatgaagatttaggtcttttactgttatgctcactgcctagttcatatgcaaattttcgtgacaccatacttttaagccgtgatgaactaaccctagcggaagtctatgaggcgctccaaaacagggagaagatgaaatgtatggttcagtctgatgcatcgtcctctaggggcgaagcattgcaggtcagaggcagatttgagcagagaacctataacgacagcaatgatcgtgacaagagctagagtagaggccgttataagtctagaggtaaaaagttctgtaagtattgcaaaaagaaaaatcacttcattgaagaatgttggaagctgcagaataaggagaaaaggaaatctgatggtaaggcctctattgttaccagtgctgataactctgattcaggagattgtcttgtcgtttttgctggttgtgttgctagtcatgatgaatggattcttgatactgcatgttcgtttcatatctgcatgaacatagattggtttagttcttacaagtctgtgcagaatggagattttgtgcgcatgggagatgataacgcacgtgagatcgtgggcattggctccgttcagatcaagacacatgatggcatgacacgcacgctgaaagatgtgagacacataccagggatggcgagaatctcatctctctcagcacacttgatgcagaaggatacaaatactccggttcaggtggagttgtaaaggtatcgaaaggttctctcgtttatatgattggtgatatgaattctgcaaacttatatgtccttagaggaagtacattacatggttctgttaccgctgctgctgtttctaaagatgaacctagtaagactaacctgtggcatatgcgtcttggacatatgagtgaatttggtatggcagaattgatgaagaggaacctgctggatggctacattcagggtaacatgaagttctgtgagcactgtgtttttggtaagctcaagagggtaaaattcaatacctcagttcatcgcaccaaaggtatacttgattatgtccatgctgatttgtgggggccttctcgtaagccctctcttggtggtgctcgttatatgcttaccattattgatgattactctagaaaagtgtggccttatttcctgaaacataaagatgatacatttgctgcttttaaagagtggaaagtcatgatagaaaggcaaactgaaaatgaggtaaaagtacttcgcactgacaatggtggtgaattttgttcggatgcttttgatgattactgcaggaaggaaggcatcgttaggcatcacaccatcccgtacactccacagcagaatggtgtggctgagcgcatgaacagaaccatcatctccaaggctcgttgtatgctgtccaacgctcgcatgaacaagcgtttttgggcagaggctgctaacaacgcctgctacttgatcaacaagtcaccttctatcccacttaataagaaaactcccattgaggtatggtctggtatgcctgctgattattcacagttgagagtttttggatgcactgcttatgctcatgttgataatggaaaattagagcctagagctattaagtgtatgtttcttggttatggttcaggagtaaaaggatataagttatggaatcctgaaactaataagacattcatgagcaggagtgttgttttcaatgaatctgttatgtttaatgatagcttgcccacaaatgtcataccaggtggttctgatgaggagcagcaatatgttagcgtgcaggtggagcacgtggatgatcagaaaactgaaattgttggtaatgatgttaatgatactgttcaacactcacctcctgttttgcagccacaagatgaacctattgcaaatcgcagaacaaagaggagttgtggagctccagtccgccttattgaggaatgtgatatggtttattatgcttttagttgtgctgaacaggtggagaatactcttgagccagccacatacactgaagctgttgtttctggagaccgtgagaagtgaatctcagctatgcaggaggagatgcagtctcttgagaagaatggcacatgggagctcgtgcacttgccaaaacagaagaagcctgttcgttgtaaatggatcttcaagagaaaggagggtttatctcctagcgagcctccaaggtttaaggcaaggttagtagcaaaaggttttagtcaaatcgctggtgttgattataatgatgtgttctctccagttgtaaagcatagttcaattcgcacattcttcagtattgttgctatgcatgatcttgagcttgagcagttagatgtgaagacaacatttttacatggagagcttgaggaggagatatacatggaccagccagaagggttcatagtacctggtaaggaggattatgtttgcgagttgaaaagatctttatatggtttgaaacagtctcctcgtcaatggtataaaaggtttgattcatttatgttgtcacatggctttaagaggtctgaatttgatagctgtgtgtatattaaatttgttaatggatcacctatatacttgctgttatatgttgatgatatgctgattgctgccaagagcaaggaacaaatcactacattgaagaaacagttgagtagtgagtttgatatgaaggatcttggtgctgctaagaaaattctaggtatggaaatcactagagacagaaattctggtttgttatttcttagtcagcaaagctacattaagaaggttcttcagcgttttaacatgcatgctgcaaagcctgttagtactcctattgcacctcattttaaattatcagctttacaatgtgctagtactgatgaggatgtagaatacatgtctagagttccatattctagtgctgttggttctttgatgtatgccatggtttgctcccatccagatttatctcatgctatgagtttggttagtagatacatggctaatcctggtaaagaacactggaaagctgttcagtggattttcaggtacctcagaggcacagctaatgcttgcttgaagtttggcaggactgataaggggcttgttagatatgtggattctgattttgctgcagatttggataagagaaggtcactcacaggttatgtatttaccattggtagttgtgctgtgagttggaaggcaacattgtagcctgttgttgcccagtctaccactgaagcagaatacatggctattgctgaagcatgtaaataatcagtttggttgaaaggattgtttgctgagctttgtggagttgattcttgcattaacttgttttgtgacagtcaaagtgctatatgcctcactaaagatcagatgtttcatgagaggacaaagcacattgatatcaagtaccattatgttcgcgatgtagtcacgcaaggtaagctgaaggtatgcaagataagtactcatgataatcctgctgatatgatgacaaagcctgttcctattgctaagtttgagctttgctcaagcttagttggtatagtggtttagtccaagaggctatttggcgccgaaagtgtttttgtctttttgtgttcagggtgaaggattgtttcatgctacaagaaggaatttgtctcaaggtggagtttgttgagttgtgatccaaattcatttgcacttaataaaggccagcttctgccgtagcggaacgaaggcccgtcgccgggatatatatatatatatatatatatatatatatatatatatatatatatatatatcttcatatctctcatgaactattagaaaaacccatagcctgaatgtattatcttatgctaaacaagttcatccattcgtaatcgtgtgcggtgtgtcgccgctcataccttttaaaagtaatatgtagagaaggtctgctgtcgaagagcaatttgttgtgtcattacctattattgttggtgagtctggagtggcgttccaattcatgacattgtccatttgcacttgtaagtggaaacatggagaaaactaacctccggagctacattagcacagattgaaataaacaaaattaaccaatcaaaatttataggcgatgattgaggaaagaaacgcacttgagattatatctagcaactcatgaactgaaactcattatccctcgagtactatcatcttgagatattgttgcttgctaactatagttatgaataagaaactaaagaaacggttgtcatcaggttaccacaaatttatgatcaaatatgtgttgggatgcaatgtacttctctcactctgctgagcttgcatgcatgtccattgacaaattcagacaaacagctaacaaactgttgttttaagctctctccatgctataatataatgtgtccatacatttaaatattcaaattttaaaatgatcaataattagtataatataaattcaattttatttactgaaaataatatcaatgaattggtatttaaatttactttcatatggttataagtttttcctacaaattttatactatatgagaaattatagaccaaagattagttttgaagaccatatcaggtttaaccatgtcttataggatggatgtagggagtacaaaatgtgatgggaacatggaaaatatgactttcttgaatttatattgcggcagccaaggaaacatacatgatcaatgggggcctttgggggttctcagatcacaaattagatcccaaagagcaaaaaagagcaggggtggctccgagcgatcaccccccatccccctatacactactctctcccttcctcctccccttattctctttctactacaccataaattaaaaaaaaaataaaaaataaagttggaaaaaattttgtatagaaaatactatatataaaaaatatttgaatttaaattcaaatttgaaacatgtatgtaaactttgggtctataaactaatatttgaattaaaattcaaatttgaatcgggtatgtaaacttttgacttataaactttaggtttataaactttagatgtatagaaatactatatatttgaattcaaattcaaatttgaatcggatatataaattttaggtgtataaactttagatgtgtaaacttgaggtgtacaaactttaggtgcataaatttactagaataggaaagtactgcggtgccaaaaaaagaacccacatggaggagggggggggggacgggccctgattgcctagcaaaaccgaaaaagagccatccctcgaacaactgacaatgagcccgaaattttgacaaattgacccttttataaaatttatttaaaaaataacccatatcaaaaactaatttcataaataaaccgtgacaatagcgccaattccgatggcgctgaggtcgaatccgaggtggcacaaaattaccacgtcagagggagctcagtgccactctagctggcgctgatataggttctggatatataacggcgcggaagagattcgaacaagtgagcggggcttaaggctgtgttcttacccaagtttcccaacccatctcccttgttttccgcgtgcacatttttcaaactgccaaatggtacgttttttacaaaaagtttctatatgaaagttgcttaaaaattatattgatctattttttaaaaaaatagctaatacttaattaatcacgtacgaatggaccgttccgtttcctgtgcacactgtgttctggatgggaacatgctgcagcgaacactcagtggtggtatccttaggcatgcatgtacggggtcgtgggttcaagtccttaccccatcgtgtttcgattgtttttttccacttagttccaaacttgctcttttaattttcttttgaaagtttaagtgtattttaaattcgttttatttttatactaagaccgaattatgaaaatttattattaccgaactaacttgtgggttacacggtacccggatacccaaggagaggtcttcgagccatgcggcatagggtggaccatgagctctaggctcatatggctatcttataaataaagaaagagagattcccgggataaagatataaatcttaggggtcatgcatagatagaatagagagatctagttacaatcaattagatactttccttgtgaccctcccccctcatcctatacaagagggggtagggttcctgagatcggggggctggggggaggatggcagcactttgcgccattcttcacatttttccaccggatacagataatccactacactggatgtatggtattacctcgctttgagagcttgaaccaggataatcatatgtcaccatctctccttgattaagcgcaccccataaaatatattgccgatcacataaattgacagttggcgcgtcagatagggtggcgcttgatcgttttcaaggcggagatggcttcaaccaccgattgccgggttattgttccaatctgtttttatgagttgattaatttctaatcaagattgatacactggtattttttttttgttttcatgccccgacgatctggcaatccgtccgcacgtctagaaaatccatccgctaccagacgatcgacgggtttcgccgtactgtagatcgcccgcgatctcgtccaggccgggcatgcaaacatgcatgtgtgcaggcaacctccgccaggacagatcaacaacacgtacgcacatgttccggccacgatgtcacggccgcaccatcatgacatcaacgtgatgtcatcaccatccatctacagaagcatgcatgcgatgtgacaaggacctccatgcccaacaatgctctacaggccttaattttttatctacatgtgcaagcatacatgtgcatctgttcctttcatctagattgatctagtttttgctggttgctaattccagattaatctatgactttgcatgcatgtgcccggcgtcttcaacgatgggagtaacaagcggccagttcctggccgtcaccaaattaatctactgtgttggcggccggctgttagcggtcacgcgcggcagcgtgcccgttcggccatccctggcctggcgtatacataaccatgcataagatcgattcacatgcatatgacatgtcagggaccatcagaatcagggagtagcaccgtatatgcccatccacatatatacgtgtggatttaattcattgatgctactaagattgatttccccttttttgtttgcacgtacgctcggggaatggtgtcgcacgcccggaggcttcatccttcgtgtggctgacgcggcccgatcacgcccgtggcacgtttgtccggaacatgacgccgcacgcccgggggctacgccgtcctcaccgcatgcccggggcttccccccttcgcggctcatgcggacccggttacgcctctatgactttgccgcggattcggggacttttcacctacctcgttatccgggcgctctacgccgactcgccacggactcgggggcttagggtgtgtttggttagatggatgagtctgaatgggagatggccgctcgattttttgtagtgtttggttaaatggcagggtggatggggaggcccggaatagggaatattccctcaatatgctggatgagtgcatccggccgatttggctggatgaagccatccagttttggactgggtgatgtgtcctattctaattggctgtggttggtttgatttcctgttaagcaacctccaaatgattttttctcctaaaccgtttatctaatttatgatttggttacaccattacatttgttataattaaatctttaaaacaagatctcggattattatattttgataaaaaaaacatatatgacaaataggcccactaacttttggctttttccatccatgctatatctctccaaccaaacaagaaattggatcgccatatccatacaaaccaaacaaaaaattgaatcgccatatccaactaaatatggatgaccatatcccatccatgcataacaatgaaccaaacacacccttagtctcccttgtcatccgggtgaccttcgccgacctcaccacggactcggggggcttcgccttccgcgtcgtccgggtgctctacaccgacttgctgcggactcggggggcttagcctccctcgtcgtccgggtgaccttcgccgacctcaccacggacccgggggcttcgcctcccgcgtcgtctgggtgctctacaccgactcttcacggactcaggggcttcgcttccctcgttgtctgggcattcatcgccgacctcaccacggactcgggggcttcgcctcccgcgtcgtccaggtgctcttcaccgaccttgccacgggctcgggggcttgacacccctcgctgcctgggtactactcgccgctgctgggtgatatgctccccgcgcaggacggctacctgtggcgtcaaccgaaggctcgcacctccgagccgaccacctacgccgccgtcaggtgatccgctccccgcgcaggacgggcgaacgtctgcttcgccgcctggtgacttcctccccgtgcacgatggctgaaacaactttcactcaacactactgagatgaatactcagccagtcttttctctcccagctggcttcaccaacctcagagtcatcgtcaagctaagtacttgggggctactgtgggttacacagtacccgggtacccaaggagaggtcttcgggccatgcggcataggggtgggccacgagccctaggcccacgtggctatcttgtaaataaagaaagagagattcccaggtgtagggtcccaaaactaacgattcagaaaccgacatgtttaattgtatcaagccctggataagtagattgatacaggttcaacaatctggatctttatcgcatacatttagtcaagactccaaaggagatatctttatataaaataatatgacatttacaagtttgtagctaactactacagcagaagctatacgatgacccaactctaccgttttactatagaattaaaccgtctaactatactagacttgaagactaggtttaaagggaactaacttatgtgattgaactcttagcttcggcaaaaactccaattaggctttgaaaaagaggggttgaagtaagggtgagtacaacgtactcagcaagctattatattattcaacaatgaatgcatgagaggtaatatctgtgtagagctagatttacttgcagaaggttgagaataaagaggtagaaatcctgaaatgcttgatatgcaacagcatttaagaaaatcttgaaatatatttctaaccaaagtaccatatgagtcccgatgctcaaatccgtgagcacgcctattcgaatagtttcaaggatattcatactccagtagatgtacgctttacccgctgtccataacttgccaataatcattagcttagtcatggcccagtattaggttattaacaatagtggcacctgttccatgaactttagtcccatacgctctgaacgtaacgttatcagcagcgagaggagttctggcgttcccgaggtttttcagagagaactggatgagagaccccacgtcatctcaaccagatttccataaaatcacacacacatcgcacgataatcaagatatttacctgcgcctcggtaaatatcacaattgccctgctcagcataagtttgctccttcgcgaggacttacataagaaccactatacagaggtaccacattattaattaacataatatctaggtctgtccccattctagaagctgcagtcgtactcattcgtttgacataagtacttggtaaacttatatcgactgagacagtactagccacctggaaatcaaccaaatcttatgtactgtcacaatctaaattcattatattttatacagtctaactaggcagggcgaagcaaaagctagcatagaactggtttgctatatgttcagattatgcattcaaaatcatgtatggctagtgcatataatagaatatagaatatagggcatttatgctcaaaagggaggaataataacttgccttgctccaacgcaaataaatccaagataggcaacctgattatctgattctcgcgacataccgtaggttgccatccaaaagacaataaactctactgagaaagagaaagaaccaaattcaataaaagccataaaataataacaaaacgataaacggttaagagggctagggtttaaggtataacctatctcttttatagggtatagggattatggggctagtatttggtagtggtaggtttaggtagtataatacctagggtttagttatatgggagtcgattgtggagtaggatagcatatcggctaggctctatattttgtgtggaggttctagaggattggtggctagaggggattaagcaactactgtcgcttatattttatgcgaaggctctcatggtttggacgataggaaaaatactagatagttgatatggttaaataggcatgtggctaatatgggtcaaggttgggctttggtagaatagtggctaggatttagttgtttaggccgatatcgaggtaggataaatatcagctagggttttgggtgtttgctagttgtcattagagttgggtagcatgacggctaggtttggtatcatttctagccgtgtcgatagaaaacatatcggctagaagaataggaggtgggtgcatgtttagtggggtggaagtgttactccgacaactgggagtggcggtggagtggctaggatcacacagagctcaagagttaactgtgtggtatgctgtggaggtcgagaaaatagtgaagctccgactgttgtacgcatagaggcgtggggtgccaggagcatcacttcgaccttaggtttggttttttgccgggctttacaaccaacggtccgacgttggggtccgtagactgtgcgaacgtccacatggaaggcgtaaagttccaaccggcggctttttagcggctaaagggtatttttgggtaaaaaggaaatatttaaagggcaaatctaagtttaaattggagattcaaatataagattaaatcaaatatttattcaaatggtatttgaataaattaaggaaattcaaatgaaatattaaaatagcaaatttggtatcaaaatgaagagttttaatttagatgaatttaggtccaaatttgactggaatcggatctacggtttaggagatatgggcttctaaaattgggatttgaattaaatagaaaaaatacgaaaagttactgttgatgggcccacctgtcaatttccttttctttttcttttctttttctctctccttctctcgtcttcttcttcctctgttcttcccgtgttctcttcgtttcttctctttccagccgagcaacagaggagaaggagaggaggggcgccgtctttccggcggctggaaggtggcgacgccggcggcgggtggtgttcccgagcatcacgcacctggggagggcggtggctggcggagagggagaggggcggtggtgagaggcggttgtagaggaggaagtcaaggaagacacggcgatggcagtggcgtggggaggaggatgacggcggccggttacttcgtgacgacggaaggcgttggcggcggcgtgcgccgtgcgcgtgtacaacacgcacacctggaagagggcggcttggctatgggccgatttgggccggctcggcttagctgggccggcagcccaagaaggaggaggaaaatagaagaaaaagaaaaagggattgggccaataggaagaaagaacggagtttcggcccgatggaaaaaaagaaagaagtctaatttaaatacttgatttggataactaggttttgcaaagaatttgaattcggaaagaattcacaaaagagatttcttaatttatttgagtgcaatatttaaaggtggagtttgagggaatttatttgggagcactcaaataggaagggaaatcaataatattcctcaaaatatttttgggaatatagaaggaaattagttgaaggcaataaataggatttgaactctaaaattggtgttatgtatatttgtggctaaaaggggaagttgagtgaagagtataagttggaattttcttagcacaagagcaattattcacaatatttgcaataatactattcttgtgccgaagaggaaatcaagccatagagattaaattggtggctagatcaaaaggaggaatttggatatttggatcgagaatcaaaggatgatggattaacaaataattccaataaaattggaatcgcttggttttggttcaagggcaaaattggaggatttcttggaccataattcataatagtgtaaatggttttcaaactaaatttgaataaaagagttttcaaatagaagaaattttagtcaaagaaagtttaatattcgaaaatagaattccaacaagaaataccaaatatgtttttaaatgaaaaacacaaaagagattaaataccagagaggttctgtgcgagttagttctaggaggtccctctaattaaattgtcctaggtttaggaagttattaagaacataagaagcggcatgatgcaggattagaaaataacacattttcaagatgttacaccaggataagatataaatcttggggatcatgcatagatagaatagagagatctagttataatcaacaagatactttccttgtaacgctccccctcatcctatataagagggggcaggggtcccgagatcggggtgctgggggagaggatggcagcactttgcgccattcttcacatttttccaccggatatagataatccaccacaatggatgtagggtattacctcgctttgagggcctaaaccaggataatcatctgtgtcaccatctctctttgatcaagtgcaccccataaagtatagagttaattggatccgtgccactacaaatatgctaaattagaaaaataccactaatattcgcaatatcgaccaggtgccactgaaattttgggaaattggatccataccactccgtcgtgtttttcgtccttcccgtcactctttctggaggccgagggcatggaggttggcgtcgtgggtgccggacggcagagccaacgggttgaggtggcagagcggcagagttgccgaagccgccgctttcttcgagccccgtcgacacattccgtcattcggccgagtacaaaggaggaggcgagattgacattggtggcggtggaaggctgtctctcggcggcggaggtgccattgccgatgaggcggtggatgtgcggggtcggggccttgtgagaggtggaggcggaggaccaccggagtgagagggcagcgccggtgcgagcgaagcggtcggggacggtgagtccccacgccataactgttacgctcccgcggcgcagttgtgacgacgtgttgtcgggcgttgtcaacaatgtcgacgtgttcgcgtgcaccattgccagcatcaggtcgaagccaccggcggtagcggcggcggcaggggttttgtcttcgtcggatggaggaggcggcaaccacctcaccaccgtgctgtcacactatgcagccaggtggctcccggacatcgcatcgtctccgtcggggaggttcctgctgtcgccgcaaagccccacggcgatgtggattatcactcatttattgatgaaggtgtaggcaggagaatggctagggtacagatattggataaaccactcagggtttaggtggctgatggggacaaatttcgtgtactcaggtaatccctaattgtggatggtggatgcagggccacatctttaaaagtgatttcgagctaattatgttggggggttatgacattatcttgggtatggactggctcacacaacatagtccgatgcaaattgattggggtcaaaagtggatagaattccattacaatcagcagttgattaggttgttgggggtcactacatagactactcattgttttgaaatatcaggggagcagttgcaggaatggctaagatgggagcaattatgtacatggttcagttggatgatcagcttgaaactaaggaattgcctattccccctgaagtgcaggagctgattcatgagtatcaggaggtgtttgcagaaccgacgggtttacctcccaagagacaatgtgaccatagaattccactggtagaaggagcacaaccggttaatttgagaccctataggtacaaccctaaactcaagaatgaaatcaaaaaacagattactgaaatgttgtagtcaggagtaattaaacacagccacagtgcctggtcttccccagccttgttggttagaaagaaagatggttcctggaggctttgtgtggattataggcaactaaacaatgtcactgttaagagttatcctgtaccaattattgaggagttgttggatgagttagtaggagcaaagtggttttccaaactggatttgagggcaggttatcaccaaattaggatggtgcctggggacgaacacaaaactgccttccaaacccattccggccactatgaatacagagtaatgtcttttggactgattggagcaccagcaaccttccagggtgccatgaatgctacttgggcatcagttcttaggaagtgtgccttagtattcttcgatgatatattgatctacagtcctgacttacctactcacctcaagcatctcaggactgtgctgcaactcttgaagcaggaccattggcaagtcaagttaagcaagtgctcatttgctcaacaacaagtgtcttatttggggcatgttattggaagagaaggtgtggcaacagatccaaaaaagatacaagatgtacttaattgggccactcctaccactgtgaaaaagttgagggggtttttgggcttagctgggtattatagaaagtttgttagagggtttggcttaccgagcaaaccactcactcaaatgttaaggaagggagtgactttcaaatggaccccagaagcagaggaagctttcaataccctgaaacatgccttagtgactgcaccagtcttggctcgtcctgactttgctaagcaatttactgttgagacagatgctagtgacacaggaattggagcagtgttgtctcaagagagccacccaattgcttttcttagtaaggcattgggacaaaggtctagggggctattgacttatgagaaggaatgtatggcagtattgctggctatagagcattggaggtcttacttacaacatcaggaatttgtgattttaacagaccattacagcttggttcatttggctgatcaaagaatccatacaccttggcaacaaagagcatttaccaagctattgggcatgcaatatgtaatcaaatatagaaagggaagaactaattcagcagcagatgccctatctagaaaggagccattggttgaaccctaagtttgggttgtatcttcctgtactcccacttggattcagactatagtcggtgggtatgaaaaggatcccctggcttctcagttgttagcagaattagcagttgacccttccgctaaaccacatttttccttacatcaagggttactcagatacaaaggaaggatatggataggggataatccagagctgcagcaacaattaatttctgaaatgcaccacagaccaatattggggcactcaggttttccagtcacttacaggaaaatgaaaggtctgttttcttggaagggtatgaagaagacaatcaagaatcaattgcagcactgccaaacctgtcttcaagctaagccagaaagagttaagtaccctgggctcctgcaaccattgctagtgccagaaggagcatgtcaagtaatcttaatggacttcattgagggattacccacctctgaaaggcataactgtattctagtagtagtggataaattctccaagtacgcttattttcttcctttaactcatccttttactgctgaatcagtagccaatgcattcatgaggaacatttacaagctccatagtatgcccaaggtcattatttctgacagggataagatatttacaagcctcttttgggagcatctattcaccaagtcgggtacagctttgcatatgagctcatcatatcatcctcaatcggatggacagactgagagggtaaaccagtgcttagagatttttcttcgttgctttgtgcattctactctaaccaaatgggctgcttagttacatttagcagagttctggtacaatagttcgtatcattcagcagtacagaaaactcccttcgaaatcatctatagcttccctcccagtcattttggaattagttctgaagattgtgtttgcccagatctgaccacttggctgtccgacagaaaattcacgcaccaacttatcaggcagcaccttcatcgagctcagcaacaaatgaaggcatatgcaaataaacatcgcagcttcagggagtttcttgcaggcgactgggtttatctcaaactccaaccctatgtgcaatcatcagtggccaaaagagctaaccacaagttatcatttcgttattatggtccattctaggtgttgagcaaagtgggaactgtagcttataaactgaatttgcctgatgacagccgtatccacccagttgtacatgtgtcctagttgagagcagcagtgggtttccagcatcaggcatctcaacaattgccagcacctctggaacatctgcagactcctcaataggtcctggatcagcacgtgactcgcaaaggtaacaaagttgttacacaagttcttgttcaatggtcaggtatgggggcggaagaagcatcatgggaagacatggaggagcttcgcagtcgatttcctcgggcaccggcttgggggcaagctggattccaaggaagggagaatgttagcaagcctgaagacatgcctggtacacatggggggtcacgtgatgacgacaaggaggatgacgaggtgtagggacaaggcgatagccaagaaggcgtcttcatcaagcaaaggcgcctgcgtaaaccaaacaccaaatattctggtcaggagtgggtcatgtaatgattcgggcccacgagcccatgtaagagggttggtgagtgtgtgtgtgagagagagagagaggggaaccaactgtatttagctggcaggggatactttgttttgattggatttggaactcgatgacggtgttggcggcggcggctctgtccgatctcgttagggttctaacaagtcccttgtcgccgcgctcccgctcgacggtggcgtcacatgcgactttctgcttcggcttctctgctctgggagcatggccggggccgatgcggcgtgtcggctggacctgagggcggtgaagctgctggagaacacgaggagcaagctcgccatgccgagcaactgctagcaggaggcgtaccggaggttgttcgccagctgcggcgacatcatggccgacaaggagattcagtcgcggctggcttggcacctcagttgctgcttccaggaggacactggccgccccccgttccctcactgcggcgaggggtccgacatggtgcactgccgcaagaggctcggcgtctccgaggaccaggtgttcctcgagaccaacaccctgtgccaccaattgcagtaagtacaactctcccatttcagtttgcaattcactgctgtttcttgaatttctttttgttgatttgtgtagagctgaagcatcgcttggcgttccgctgcgacgacgtcggtggcggcgacccgcccggtgcgagcacgatgctgctggatgttcccctcgtgctctgcctcgtgcgcagattcctctgcgagggtggcaaggccagcgcaagcggctgcctgcagggcggcgaggttggtggacacgtacctcgccgagctccttcaccaccgctcgcccggagtctatgccatgttagaacattgcttgctatctagcacatgtgtttgctcatcaatttgatattatacatacatgttgcaaataccagctcttagtggtggaattggtaagttggcatataatttatttgaagtatgatttggcttgtcggcgccgcctctcccctcgtcgacgtcagcgccttctttaatgcgcaataatccattaaggtgttttctgttaatagtaaaaacacagagaaacttctaaaattcataaaaaattaattcgagctccgcgtttaagtccattcaagtctcagtaaatccataaaaaaatggaaagaatccaactatataaggagggaaggacgccccttgagggtggaatcaccaaaagatcttcggatcaagactatatacggcggattcaatccgcaaacaggagtagggtattacttctcaatcgagaaggcatgaacatgtcaacccatgtctcataatccacccattttccttcttttgcgctatcccttttaatattgccgaattctagtttcgataaggaagtttggagacactccatgcctggctttgcagttgagagacacggttgaaactcgggccatagttgatggatgtaaagtggacttttttcccttcttggcagtgtttagctaatgggatatggaaatgatttcctacccagtaaaagacatctttaaaccttaaccattcattctccctcttccatttaatcctaacccttcattcatttctaatcccaatcccacccccatttcccattatccaaaaacaaaaagtccatatctctgcacgaatcttgatgacaaatggggccacaaaaattgactgaaatatgtgcttttttcagtcatctgaaaagtactcttttatctgtaacaaataccgatgctgaacgcgatggcaaaatattgtattgaatatcgatcagtctattatctgtaccaatttatctgttagcacggctgttcaaactgattgcaaatccgacattcggtttaattagatgagatcgtccctagagaaagaatcggataaagatatatatagaattgtcttgtttcgtgaggtgcccggaagtctccccaatatacatataggtatacaaactagaaaacaaatatccccaatatacatacaagaaaacaaacatagtccatatccataagtaattatagcagattaattttaaaaccgcgaaacatggttgtgtacgcatgagctagctagctctcgggactctttatcgcgcggtgcgcgctcgctgtccgtgctgaacacgcgacaaccatctaagcgtacgtacgttaaccccggccgtaatcttaggaccatcgacatgtcatacagtattcgtgtgtgtgtgtgtgtgtgtgtgtgtgtgtgtgtgtatatatatatatatatatatatatatatatatatatatatatatatataggacactcatatggggcaccatggtgcccgggcaccatggtttcaaatgcacaaaatcactcaaatttttcaaaattttcaaattgtgagtatatacctagttataagaattcgattcatacctatacctatcaacaaaacaactcaaatttaactttatttcacaatccatgattacatacctaactaattatatgtatgtatgctatatacctagaatcaaaatctaacaaaaacaagttcaaattcagttcaaacttgctttcaactagttagtaaagtagttaatattaatacctaaataattgaaaaagtttcatgctcatttgaattgggtatatactcaatttcaacaatggtgcccggggaccatggagcaccaaacaaatttactatatatatatatatatatatataggacacccatatggggcaccatggtgcccgggcaccatggtatctaatgcacaaaatcactcaaatttttcaaaattttcaaattgtgagtatatacctagttataataatttgattcatacctatacttatcaacaaaacaactcaaatttaactttatttcataatccatgattacatacctaactaattatatgtatggatgctatatacctagaatcaaaatctaacaaaaacaagttcaaattcagttcaaacttgctttaaactagttagtaaagtagttaatgttaatacctaagtaattgaaaaagtttcatactcatttgaattgggtatatactcaatttcaacaatggtgcccgggcaccatggagcaccaaacaaatttactatatatatatatatatatatatatatatatatatatatatatatatatatatatatgagacgtgtagtcgcccggctaaagatcgatccgccaaaataaattagcagcttagctatttccatatccatctacctaaaaattgaagaaaagatcgatttctccgtgccggcggcctcagcggttcgttttgacgaccatcttcctagttgccgccgcttttgcgaccctgcagctcgcccatgcccagccaccagcgacacgacgtgaagtcccgtctctcccgattactttcaaccttgtgacccagacacatcatgacttctaccgcgaaccacgtgggatgccggccaggactagttctccacccactactacagaaagcgtttttgcatacgggcggaatcgatcttcacatgcggttggctggcccgcatgcgcgaaatggtctgcaaagatcaccatttgcgcatgcggccgtcgcagccgcatgcgaagatcgatcttcgcatgcggtcacttaagacggccgcatgcgaaaatagatcttcgcatgcggtccatataagaagccgcatgcgaagatatattttcccatgcggtcgacctaagaagaccgcatgcgaagatctattttcgcatgcgggcgtcttaagtagaccgcatgcgaaattcaatttccgaatagctaaaataatatttattctagcattttggtgattcgtaattaatattaaattattgagggatttattatcgtatttcggagtagtaagcatataagataagataagtgccgcagtaacaaacatgtaatacataaccattaattcaatcgtaatttacatacaaatatataatacaagtggcacagttttttcatcatatgtataagtagtgtacatgttattgcatatgttctttctcccactctctgagaggtttaaatttgtcgtccattgcgagttcactctggttgtcgtagaagagacctcttgcgttgcagacatcgcgacggatgaatcggcagaggtcagcggccacgttcaagatagtagtgtggttgaatcgttgtgcaatatatgggatttcggggatctgcacacagaaaggaaaataaaacggtactcagtgagaagtgtgtgcgagatgggtttctttgtagagaagagttcgatgacctactcggttactggttgttttgtacctcccatttactctgagcatctcgcacacgtaataaccacacaagttggttcctggtggttgtttgtagcactgcgatataattatggggaccgatctcagtagatatatttagtatatatgtactgttcgataattagttgtattggtataaatttgatagtaccggccagccagtcctgacggataacttcttctgggatggaatatgtactggtccacctcttttgcggtagtacttgtgtgctctgtttgaaggaaacaattgttttattagtagttagaagactggtgatcgacctaaacaatttatagtaatgaaatgtttatcacttacaaattcaaaatagtgaggaattccataaatgtctccttgtcatagtgtgcggggtccaatgatatgatcaattggtctttcggatatacaaggaataatatgtagtggtctctacatataagataggcttattggagacagaaaattccgaagaagataaattaattaaacaaaaagaagatagagcttacgtgaactggtaggggaccattaagacatctttgtcggcgtgcgccaacattgctattgccaagtatgttgctacttctagcttcttcctcttgtgcaatgtcttcacatattcttccttttcttccggggtcttgccaaccaattgctcgcagtcctgtctcagctctacggtgtgttgtgttttgcatattcttgttggatcgacgtatccaacctttgctccagttctatcagcttcgtggaattgcatactgtacaatgaataaagaagaaatgagatttggtttatttgtttcgaatgaaacgtgcaacatgtaataaagagttcagacttacagacagaaagccgcaacgagattaacgtccattttatctagcttgtagagggcgtaaaggtcttggaaagagataaaaaatatcccattaggaccactcatgaaagcgccttccgggacggcgacgcttatgaaaccgagacctttcctagatgccttcatataccattcgtgcattaccctcatttcccatggtagcttgttcataagataagttggcaagaatggcttgtcatactcataagtttcaggcacatcggcagataaccaggattgcacttcatcttgggccgctagtactgacttctgggagtctgacaagacgtgagcaagttcttttctcttctcagaattcctgaaagctgaaaacatgaacttctccttatccttgtcaatctcctttgggtcgtatgtcgatatcaactttggaattatacgacgaggttccaaagtattagactttggttcggatgtagtaccatctggtatgtgcacttgttctaccagagcagattggggtgtaggtggagaggtttgaactgagggcggagccgggggagcatgctgtttagttggggaggtgggagaggcttgaactggttgcggggtcgggagaggcggttgttgagaaggggagggtggtggtgtaggttggcgaggcggtgacctaagcggtggtggtgacggcggatgtcgaggtgacggtggttcaggaggcgacggtggtgcaggagcggcagcagtcattgcctgcgatgaggatggggttgaagatcctgctgcaagaacggccgcgctcaggattatgtctctgcggtgccacaagataaactgattcactgcatcaccgagaagttcaatcccctcaggtgcaggtatgtctagttccaaggaaacgtggtcgctatggaccttggcgacctatacccttgcgtaatcctcagggattgccgtgttgtggaattgacgtccgggtatcgctaaacccgttgcaacctccttagtctttccagcgcggccgattggtacgacgagactgcacggagttggtccagttatactatccacagggaaggtacttgtctgcattgagcctacactgctgggtacattagttgtttgctgtgcggattgtgtgggttgctggctatcagggaataaccttggaaatgctgtcgggttttcagctgccaacgagtagaagtgttccttcacttgcgcatagatcttgtccgatagttgttctttgtatttgtctctcttcttataacttggtgcgtcttgtggaaacccgaccttccaatttgtctttgaggacaaaccccttacacgtccagagtgttcagccgtccccaacgccgcagtaagctgatctcgctccctccgtgggacgaactgtcctgatctttctttctcgactatctgctgcaaattagtagtcacttcttctatgtctggagtctcgaatagtatgtctccctcatccgagacttgacctgtgctgcgcgcccaaacccagttcttgctacgttcaaccatggggtctaccagcaggggcttaccggccgcggcaaatctttgctcgatctcccgccattgatcgacgtgaccagcgtatccgctcgaccccaatctatggggatatctgttcttcttcgcgagctcggacatttttttcctcaaagccaatgcttcagctgttgtacgatccgcaacaaacgtgtcccagtcagcctgcgatatatgtccataatccgtaaacggtgggagattcttctgaacataatcccgatttagatcggacttccactgtcgccatcgatctcccatctttttaagtgcgtaatctctccccctgacctctgatccaggagggaacacaaaatacttctgcaactcattccagagaagtgtcttgatgttgtcgtccactgtttcccacaacttgacattaatgggacaacgcgtcctgactagagtgccacaggcgttgctgaacttggaccgcactatcggtggctcgatgggcttcccatcctgatcgagagcaatcacgttgtaagtttccttgggtaatttattcttgcttctctcaccacgtctttttttcccactcccgcctgcacttgtagatgtctccgtacgttcaggtgcagacgtagcggtgtccatctcaacttcttgctctgtcctgttcctcccggctttacgtttcgagcggcgtcggactaccatctgcacagaataggtaactctatacaccattaggttcatgtcacatcatagttagggaataatacatggctaacgattttcaacacttacggcctgttcgataggtatgtagtccggatcatcatcgcggggggcgacttgtgttatttccattggaaacgggtcacttggtgtgcgccacgtttcttcactagaagcgtctggctgcttattgctaccggaattttgaggagcgttaccttcttgaggcgctattggtgtgttcgatggaaccttttcgttcgacatcttccaacttgacgtaaaaaaatttgacataagtcccaattttacgtaagtcccaatttaacgcaatttcacataagtctcaatttgacataagtcccaatttaacataagtcccaattatacataaatctcaatttaacataagtcccaattatacataaatctcaaattaacataggtcacaatttaacttattttcacataagtcccaataacttaatttcacataagtcccaatttaacataggtcccaatttagcataagtcacaattaaacagaaatctccatttgacataggtgccaatttaacataagtctcaattatacataaatctcagtttaacaaaaatcccaattatacataaatcccaatataacataagtctcaacttaaacataagtcacaatttaacataggtgccaatttaacaaaagtcccaattatacataaatctcaatttaacaaaggtcccaattatacataaatcccaatttaacataagtcccaatttaaacataagtcccaatttaaacataaatctccatttaacaatccacaattaaaccttctcaaaattaaacaatccacaattgcacatatcacaatccacgatgcacaattaaacaatccacaatccacaattgcacatttcacatttctttttttaaaagtaaatgttaccgagcgacggcggggacgacctggcggcggcgacgacctggcggcggcgatggcaacggcgaggggggagaggtccgtgcggcggcgacggcgacggcgaggggggagaggtcctggcagtggcgtcggcgacggcgaggggcggggcgacttcggggaggagccggcggtagcggggacgacttggcggcggggacgacctggcggcggcgatggcaacggcgaggggggagagttccgtgcggtggcgacggcgacctggcggcggcgacggcaacggcgaggggggagaggtcctggcggcggcgacggcaacggcgaggggggagaggtcctgacggcggcggcgtggggcggggcgactttggggaggagccggcggtggcggggacgacggcgacggcgacttgggaaattttggcagcctggcggctagggtttcgcgggagccgggacttagaaaattttggctccccgcgctccctatatataggcgcagatcatcgcatgcgggcggcttaagggaccgcatggaaaaatatctttccatgcggtcgacataagccggccgcatgcgaaaaagatctttccatgcgggctgttaagccggccgcatgcgaaaaagatctttccatgcgggctgttaagccggccgcatgcgaaaaagatctttccatgcgggctgttaagccagccgcatagaaagatctttttaccaaaaaaactcatatttttttttctctaagtaaactgtccatatatatttttttcccaatatttcgccacaattatacattccaaatgtttttggcactaagaaaactcatgaaaattgctcaaaactcgtaatcaaatgttacatgctaatgattacaacataagggggacctaaattcatgcacgtacatttgctaatgattacaacataagggggacctaaattcatgcacgtacatttggaatacaatgagaactaaaggttacgaaataactatgacttaataaccttggcaacaccatctgctcgaacgtacgacatatttgcttcatcgattgttctctcaaccttcttaattcgcataggaagatcagtaaacaatggtacatcatcgaactggttgtaatcattggggtcttcgatgttgtcgatgccgacgatctgttgctttccggatatgacaatagtttttctttcatctgaagggtccttcacataaaacacttgagccacacgctctgctaaaacccatggatcatccttgtggcctgttttactgtgatcgactatcgttagcccgtagtcatcaacggaaacccctattgtgtctttaacccattcacaacggagcacagggatctggatgtttaggccatagtccagttcccatatttcttgaatggtcccataatacgacctcttttctccactcgtgtcaatcgcttcgacacggatcccactgttttgtgtggtgcttttcatgtccttcgtagtcgtactcaaggtaaatccattgatgtcgtaaccttgccatgaattgacaatacttgaaggcccacatgccaatctttgtaaagtaagttcctccacagaatcaccaactggcaggtttagatctttcaaccacagaggaaagcgacgcttgtgctctcttgatatccaatcattggaccgccctgggaagcaggctttgatttcttctaggtgtcgctcaatgaatggctcaacgatagcgagctgttgaagaacgctgttgtgtgccgcggacacctttttgtaatcattatcgaagaactgcttcctaccaacagtaccccttccagacaatctaccttcatgtcgatgaacaggaatgccaatggcattagcatcctttatgtagtccatacaacactcgactgcctcttcagttgtgtatccctctatcattgatccttccgggtgagcgcgattgcgtacatagcctttgaggatcgacatgtaacgctcataggcccacatctgatgtaagtataatggaccaagttcaataatctgagggacgatgtgaacgatcaaatgctccatcatatctaaaaatgatggtgggaaatacatctcaagctggcatacagtctcgacggcaaatgtctgaagcggacctaattccaaaggatcaaatactttctgcgaaattcgattgaaaaagtagcacaactttgttataaccacctttgtatggactggtttgactgcccttatagcaattggtaggaacaccgttagcaacctatgacagtcatgcgcattgtatcccgaaatggacaaatccttcattgatactagcttcctgatgttcgatgcgaaaccagtaggcactctaaccccttgtaaacatttacagaaggcttttttctcatcaagtgtcaacgagtaacaagcaggaggaatctcggtcttcccatttggcagcactactaggtgaaggtcatgccgtatggacaaatctacaaggtcgttacgtgacttcaatccatccttcgttttactcgggatgtccagcaatgtgccaacggtgctatcaaacacgttcttctcgaggtgcataacatcaattgcatgtcgaatctctaggtccttccagtaatctaagtatttaaagaaaattgagtgcttcttgaaaggcgacgcagtatcgttgtcaccatcagctttcttcctctttactgtcttcttctttccctttccatatacaaccttaatcttctttgttatctcatacacgtatgtaccacctcttgctactggggcagtgtcattctccactgtattatcgaacaatctagccatcttacggtacctatgtctttgtggtaggaaccgtcgatgtcgcatgtacactgtcttcaaagacgacgtcaggtatttgtatgaagttttctccagacatatcagacatccagtcttccctttaatctgcccagataatgaaaagtttgcaggtaggtcattgatggtaacgaatatgatcgcacgtagattgaagtgctcccgcttaaactcatcccatagtcgtaacccctctttccaaagctcctccatgtcctccatcaaaggctcaaggaaaacatctatgtcgattccaggttggtttggaccttgtatgaggatagtgagtagaatgtactttcgtttctgacatatccatgttggaagattatacattgtgagaaggactggccatgtgctgtgcgagctgcttaagtcaccaaacgggttcattccatcagtgctcaacgcaaaccttacattcctaggatccttagcaaattctgggtgttttgcatcaaatgtcttccactggcgagcgtcggcgggatgtcgaatcataccatctattttccggctctcttgatgccatctcatcaactcagcatcagtcgggtttgagtacagacgcttcaagcggtccttaattggtaggtaccacatcaccattgaaggaatcttcccgcgcttacccttatcagaatctggatcggtacactctgaatctacgggcccattccccgttttataccgacttgtgccacacgttgggcaacattccaattccgcatattctttacggtataatatgcagtgattcttacaagcatgaatcttttctacaccaagagataaaggacatatgagtttcttcgcttgatacgtgttcgatggtacaaagttaggcttaggaagcaacacacgcaacaaactcatcagatcattaaaacttgtgtccgaccatccatgtttagccttcaatctcagaagttcaagcactgaacgcaagactgtgaaatccttatcacatcccttcgtttcatcgtaaagaagatccttcgatgccttctctaatgcttgccaattctccaatcctcgtgacctgcccgctagcacctctggttcaacatggcgtagcatatcctctaaatcaaaaccaccatcgaaatcatcactatcggtggaaacatcgacaaccattctttcacgcgacatgtcttcgattataaaattctctgcctcattcatctcgaaacttaactcttcatcgtcatcttccggattggcgaattccccgtgataggtccaaaccttgtagttggcggtgaatccgtactccattatgtgacccaatatttcaccaggatctaccaacaatttctgattcttgcaatgacggcacggacaaaagatctttgtcatattctccctcaaagcatgctccttagcctgatcaataaatttagatgcttccttaataaatatcggctgcgttctccgtatctcatacatccatgacgaccgatccatctaattatataaaggcaaaaaagttacagataaaaaaatagaccgcaggtatttcatacaaaagtttaaatgcatttgtctcccaaaaaaaatacaacaatacatgtaacgtacaattgattacatgcaaaatttgcccatcaaaacatatattttgaagctagattttgcaaaaaatagttagaacaaaccttgtcaaaatattaaaaaaactccactttccaccaacgaaatataacaaaaatggagccaaatgaagcaggatagagagttcttcacctttcgtatagagttcaagtaaaaatttcgagttgaaaacctcccccctaattggtgcttgctttaggagaaagaaagcttcgttttcaaatggtcaagctcgggcctggaggagcatatatggccgatcatcgcatgcggtcccttaagccagccgcatgcgaagatccattatcgcatgcggctgcttaggacagccgcatgcgataatgggcctattttcgcatgcggccgtcttaaggagccgcatgccctaatacatgcggccccttaagacggtcgcatgcgaaaatagacctattatctcatgcggctgtcttaaccaaccgcatgcgataatggatcttcgcatgcggctaatcaacccgcccccgggggggcggtttttgcaggtgccgccacaagcggcccgcatggaacctaccgaccccctcgtacaccaaccccctcgtacagaaaaacgatttttgtagtagtgaccgtacgacccaaccgatgtgatggggagaaacgttctcgggaggaggcgtcccgcgttcatcagcgtgccatggagatgggtcatggtggatgtcgtcgcccccagggacgccggatcacatgtagagatgatgaggacgacattagcaattgccgatgacgatctatacattcttggtttcgctaatcgcaccggccattggcacgtcatgaaagattttggaggtttaccagaaccactcacgaagctaacgattgaacatagctatggcgacctggttggtagtttccagaatctccacacagttcctctgggaagggagtccgccgtacaagccgtcagaacacttgcaaactacaacagcgccatggccgaagcacaactcaaactgccgattgccaagtttgcgatcatgatatctgaagccctgcggttccctttcatcaggaatacgttcagtacaaattgggagagcgagaccttcatgaagccggaccatgtgaaatacgtggtttattggggacggctctctaaggccctagtgtggtggaagcaaagtggaaataattggtggccacgtccagacagcgaccttggtgaagactttgaatacattaatgtcaaaacgtcacaggatgctgtgaagctagttgatttgctgattcgcccagcttcaaggtactcctagttttttttagtttaatgtatgtataatttcaatatagatagaaaatagtagattttgtgcacattagtgcacacgctaggaatctctaccatctatgtgttcctttattatataagtgcgtgttatatatatattaaaatgtgatgagtacggttcataataaagttctcaatctttttctctccaatgattagaatgtgtaacattctccctttgttgatttttttaatagactagcagaaaatacctgtgcgttgcaacggaaaaaaacttaaataaaaataaacaattagggtttaattttcacggtcgacgccctttaagaaaatatattcttctgtagacatgcaaggtataacatattcaaaatagtttatttcttgaacgtaaaccacaacgtcaattataatttatgaaaaaaggcctaacttttccttgttgattaaatgtaaattaccgaaacgcatcccgaccaagcaaactatactaccttgtttattttttatgtttttcctctaccgatacgtttcagtgcatgcgagcaaggataaaaggagagagagagagatagagagattgaacttttatactactatactagctgggcgcctgtgagttgcgacggaaaaaaatctctatgaaatttttaaacaattttatacgatctgcaaagtatccacacaatggatcattcaatggctgcaagcttttcgcctgttttgaacatactcttcatctgactgcagcgaattatcagcagacagttgagttcaaaaggaaaattaaaattctttctgtattggactaaaaaaaacttgatatatttattactttttgaaaaactttttgagatactacattgattaatcagaatagaacgtgatatatttattacttcctctgtcccatgtcccataataagttaaactttcctatgtcttgttatgtcatatccagtacgaaaagtcaaatggcatatttgcaaaacaagtaatttgtgaataaaacgtttatatacgtgttcttagtgatatgaaaacaaatacagaaaaataatgatgaaaaaaccctctaaaatcagctttaaatttaagggctaaaatttaaattttggctaataattatgcataagcgaaaagataagaccctagataaacttattttgggacggaagtagtactatccttctggataatgtatagtgaaagaacttaattaaaagtgccggaggtgttgtcagtagtcagcacataccttatttccaaaacaagagatcagtcttgttattctgttgcaatgaaaaataatagcgtacaacacacgaaaatcctaaatgattaacagaaacagacgattaaatagggctctaagtgtaaagcaatatcatgattatcttttacaagtcatgcaatttcatattagcaaatctattttatacccccatagaataagtattctacatcttctctcatgggcaaaccgcaattcccccacccttcctagagcccaatccttcctcccacctcgatcaaagggcagtcaaagcatcctcccgccggtcagaccccagtcaaacctgcttgtatgcttccccacgtctacctatttgatgtcctcgtctcacaggaattgtgttgtaccaagacgatcatactatagtaacaagattgctttctcgcagtaacaatattataacgttgtcaaaatatagtgatgacggatgtagttttataaagctcttttttttaaaagcaatatggtgaaaacggttcaaaaatataatatgtgatatgagatatatgatcgtttaaagattagaatttcaaataatccacttgtatttagtttgctactgtgtatcatgtgtgtgcaaagtgaagtatttttagcactttgtcattgttacggataaggcataccttctatcctacgactaatgaaatatgcggatacgacataccgtcgtatgtatggtatacttctatatacgataaggaaattaacaggagataatgaaaattatcctcacgggggcaagtgaataacagaattctactcggagagaattgggtttatattatatcgttttctcctagttctacttggagaccaaggtgattcacggtataaaaaggcataccctgtgaggggtccagatcaccgaatcttatggccaacactaccaccatagtcttcaagccggaggatgcaaagcctactcgctgggagatctcgtcgaatcatctcgacaaggatctcgtcagtaacatcgggatcatctattctcattctactatgtggttttccatatcaatcacatataaactggattagggctattaccttacgaggggtctgaaccagtataatctttgtcttcttgtttgcttgatatcgtattgtgtatatcctcgtaccaacataccccaatactcccatccggtctacgggtatcacatgtcgacacattttatgtcagcttgcggccatgcacctctctaactaaagcaatagtattacaacggtactaccataagattgggattattaaaatctagctctacacattctgtagtactatagaaataccattactactacatgttctatgttactacaatttccacaggatgttactgtcaacagtgcagtaggggagggagccgcccttgcccatcgcctcccctcccgtcagaaaggagggcgccgccgccagccaccgtcgagccgtcccgtggccccatggcgagggagaggaggtgaggggtaaacaggtgtcgccgcccgcggaaggagatccgccgatgctgaggagcagcttgccggccgctgctccctagcccacccgtaccgttgctcgcgggtagagggagaaggagagatgaggcggagaggataagggaaagagagagagagagagaggggggagggagaggggtaatgaaagggggagatagagggggtgtggttcagctcagtcagctctaaagtcagtttttttaataggcatcatttttttaataaaattggcacctataatattgtttgaggcatgacacgagggccttcggccagatctgcccaaacaatccaacccgtgaggaatcaagtcaagaccaagaggtttgactgggcgaagccacatggcgaactgtatggcgaagattaaatgactgagtctaagctcaacaaagcatatcggtcgcgggcgaaggccatgactgaagtccatggcgaagcccctaggcaaagcgtgaaggcttcgcctgaagaagccgcacggcccacggaggcctttcgacatagctgggccgacctagctagcccatttggagcccataaatgtaaaggacactgtgtgccctcactaatgtccctatcataagggtatccatataaattcccctgtacaacctaaaccctagaaggtgtaagcctgtattaagactgtaaatagccccctaggaccatataatgggggatccaaaaaattttaccaattaatacaatcgtttttactttccaactacctgatgagtgaaccacgtcaaagcggttgtcaatcgacaacaaatataaatatagattttttttaatttttaattttttattaaaagttttacaaaaataattttctatttgaaaaattgacaaaactaacctcccgctgtgtcaggccactcgggctatatactgaataagatactaaacatgacagcgtgaaatatttagttggatggggtctcaaataaaaatccaaatgataggtaattaataacggtaaccatccaacctcatcgctgccctgaaatgtcgaatatcaaactcaatataaaacccaaagcgccgagtaatgaatataagaaatcttcgaaagaaacagcttgccagtcaacttcactagtacagatccttccatctgtggtggcctctaacaagcttggaaatagcgggccgtcacaagaaagtcatctcaatcaggccgaaaaagtgctcgattaagatatggtcgcacagacatgttagatgggcataaaacttaggcccgtcacggatgacacctatcagtgagggaccgtagtttaggcccgattgagataacattccatatctcaaacgggcctcaagttggggctcgtcacagatgaccatcatccgtgacgggcattaactatagatcgtcacatataagggtcctctgtgatgggctatagtttaggcccgattgagatgagtgtcatccgtaacggactctagttgaggcccgattgaaataacaactaggcccgtcacagatgactcatcagtgacgggctatatactaatgcccgattgagatgacttaatctctatcgggcattaactaaagcccgtcaccaatgagtatttttccatttttcatatgaaatgtttatatttgtaagttgaactatagcaaaataattaattgcagtataataattcattttatgagtcaaaataattttacgggtagtaaatgatttcaaatggaaaaattatcaacaacaaagttgtataacttatcaagatttacaacttttagtttggtcatttttctatataacattttttgaacagtttgaatttgaatttgaaaatatgacaacttcaaacaatattttcaaatactaaatgatttcaactgaaaaagtcatcaacaacaaaattgtatatctcatcaatatctataacttttagtttggtcatttttctatataacattttttgaatagtttgaatttgaatttgaaaatatgacaacttcaaataatattttcaaataataaatgatttcaactgaaaaagtcatcaacaacaaaattgtataactcatcaagatctaaaacttttatttttgtcatttcttcatccgataaagtgttagtaacattgttcacagtttttacatatatgtgttatggtttataaaaccagataagagatatgtcaattttgtgaacaatgttattatcactttgtcagatgaagaaatgaccgttttacatcttgatgagttattcaactttgttgttgataactttttcagttgaaatcatttagtatttgaaaatattgtttgaaattgtcatattttcaaattcaaattcaaactattcaaaaaatattatatagaaaaataaccaaaataaaagttatagatcttgatgagttatacaactttgttgtcgatgactttttcagttgaagtcgttcactaacaaaaaattctatttgaatttctcaaaccttgaatttcaaatttcaaattgttcaaatagagttagatggaaaaataatcaaaataaaaattttgcatctcgatgagttctacaactttggttctggtgacttttccatttgaaatcatttattaatcccaatttttgttcgaagttgtcaaattttgaaaattcaaaatttgaatcgtccaaatgaacttatttgtacaaaggaccgatacaatagttgtagatctcgatgagttgtacaattttattgtttgtgatttttgcatttgacacacaaaaatcagcctaaaaataaatttaaagttctcatttattgaaaataaaaaataccacataaattaaatataaacatttcatatggaaaatggaaaaataatcatcggtgacgggcattatttgaaactaaagaaacggttgtcatcaggttaccacaaatgtatgatcaaatatgtgttgggatgcaatgtacttctctctcattctgctgagcttgcatgtatgtccattgacaaattcagacaaacagctaacaaactgttgttttacgctctatccatactataatataatgtgtgcatacaattaaatattcaaattttaaaatgatcaataattagtataatataaattcaattttatttaccgaaaataatatcaatgaattgaaatttaaatttactttcatatggttataagtttttcctacaaattttatactatatgagaaattatagtccaaagattagttttgaagaccatatcgggtttaaccatgccttatattataggatggatgtaggaagtacaaaatgtgatgggaacatggaaaagatgactttcctgaatttatattgcggcaaccaaggcaacatacatgaccaatgggggccttcgggggttctcagatcacaaattagatcccaaagagcaaaaaagagcaggggtggctaatgggcgggtgaccgctccaggcgatcaccccctatcccccctatacgctactctctcccttcttctcttcctactacaccataaattttaaaaaaaataaaaaaaacaaagttggaaaaaattatgtatagaaaatactatatataaaaaatatttgaatttaaattcaaatttgaaacaggtatataaactttgggtttataaactttgtgtctctaaactttaggtgtataaactttagatgtgtaaacttgaggtatacaaactttaggtgcataaatttactgaaataggaaagtaatgcggtgccaaaaaaggaacccacatggaggagggggggatcggccctgatcgccccgggcaatcgctcgcccagtagcacaaccgaaaaagagccatccctcaaaccactgacaatgagcccaaaattttgatgaattgaccattttataaaacttattttaaaaataacacatgtcaaaaactaatttcataaataagccgtgacaacagcgggtcatgcaggtacccaaggagaggtcttcgggccatgcggcatagggtggaccacaagctctaggcccacgtggctatcttgtaaataaagaaagagagattcccgggataagatgggagatagcagtatagggagtccatggaagtaattggtcgtttggggatcacaaaactctgggagttgagaaaattggtttggtttggaaaacatgctttaaggccaactctgggagttgtgaaaacttgaaaataaaatttgtcacttctcagccctgaccgagctgagacttgtgtcactttggttatagaaagcacacacttagattgtttaaaaattgaaaacaaaatcgttttcaaaataaacagtctttccttgaagcttgcaagagtgacataagtacccctggcttgctgagtatgtaagtgctcacccttgctctctacatagtttgccagctttgaagtgaagttgaagtgaagtgaagtgaatattagggttttgttctggttcctagcagttgcctatggtattggaagttagttcatcggttcccattggctatgctgttgttgttgtttccgcgtcgccggtttcattgtcgggcttctcttgggagttgcaacttaagtcaagttaaataagtcatctatttaatttaaagattgcaatgattcataattgtcaatgtgagtaccaacgctatgttatgggactagtgccgatatcgcagtctcgtaggaggtggttcccgtcatttttcctacgacatgctcctataaggtgtcgttgtatggtgatgccagattaaggcgtgacaaaatactatgcacacgcagggcttttaaacaacaatttagtgagatcatagatctgccattgatttttcatttctttgagcgtgtgtaggggcgcattcgcaggtgtgtgacatgtgtgtctacaatgtaatcaaaaaatcaaagtcgccctagttaagggaggctaaacgaactttcctcggaaaaaaaaagaacggaggggttttagccggaataagttcactttatgaccctcaaatgtgatcgaaatctaatccgtgaccctaaactacaaaaccagatatctcgaccctcaaactcctaaaactggtgcaatttgactccctcggcggttttgagggtggctttgctgacgtggcaccacgtggtgcctacgtggcgatattgaccaagtcttcattccacgtagcgttgatgtggcacctacgtggcggtagaaattaaaaatatgcgtgggacccattagtcattcacacgaaaagaaatgtgggcccacagacatgtgggtcccacatgtcagtcctccttcctcctccctctctcctttctctctctttctctccccttcttccctttggccggtggcacgcggcgacaagcaagtttcggccgacagcaggcggcgagagcgagcgacggcggcgtgcaagtaagtcccggagcggcggcggcgcgcaagtgaggggagcggcacgccgtggcggagcacgaggaggcggcgtgagaaggccgagcgaggaggtcgagtgaggaggcggcgaaggaagccgagcggagaaggccacggtggagcgcgaggaggcggcgaaggaggccagtcgagcctccggtatccgcccccggccccatccctcacgccgatggcggtggcgcagctgctgctgggcgaggacgggagggggtacgacctcggggacaccgcccacgcgtctccagtccccatccacttgggaagccttcctcttctcctcctccggctgtggctccgcgcccctgccccctcacccgctcctgctcctccagctccgcgtccgcgcgctcctcttcgacaaggcctccgccgcgctcctcccccgtggcgcctccccagcgggcctcaactctgtcaacgccaactgtgagccccaactcttgcatgccaccgtgcgccaccggccgaagggaagaaggggagagagggaggaggaagaaggatgactgacatgttgccccacatgtcagtaggcccatatttctttttgtgcgaatgactaatgggtcccacatatattttttaattctaccgccacgtaggtgccacgtcaatgccacgtggaacgaagactcggtcaatatcgccacgtagcaccacgtcagcaaaaccacccctaaaactgtcgagggagtcaaattgcaccggttttaggagtttgggggggtcgaaatatccggttttgtagtttagggcctatggagggacttttttttttttgtgagagggaccacctaaacaaccccttagatttcgatttgagggtcataaagtgaacttattccggttttagcctgataaggcggccacggcccacgaactagtcgagtccccgtaatataagcagaggccctccgctcaatcccctcatcacctgccgctgccgctgaagcgaatcgccgccgccgtcctcgaatcgtcgacccggttcgtcttcctccccgcgcgcgcgatccatctattacagcctcgaggtgagataaaattccgtttgtcctcctgttctaaggttgcatgcgcgttctcattggctccaatggggattttcttttcttcagtaaatttcttgatgtttgggggcggcctgggcctgcgcgtgctccgatggggattttttttaggtaaacatgctgatgttcgcgtaaactaggtttgtgtgttaccctagcgcgtggtggttggttgcttgcaatgcgattgattaggttttgcgtaatgggttcgatcggatgggttgtggggttgggcgaccagaagatttatgagtagtagcgtcagatcagttttagacaattaattggttgcatcttttctcttgatagtccgcctgttctacacttgtgctacctgtaggtagagattgttaatttctcatatatagcaccatgtgctgatccttaattttgttggtaatttgtatatgtaaaattgttaaatttttcaaactcttttctgctcgctccaggctgtcgattaatctcctggctatttacttgagtgttgctgcctataccaaagagcagtccattagcgcgtgattaattaagtattaactttttttaaaaaaatagattaattatattttttaagcaactttcatatataaactttttgcaaaaaacactacgttttgcaatttgaaaagcgtgcgcgcggaaaacgagagaggttagggagaggcaattaattatattttttaagcaactttcatatataaactttttgcaaaaaacactccgttttgcaatttgaaaagcgtgcgcgcggaaaatgagagaggttagggagaggcacaaacgaacacagattgtgaactcaggcactttggggttgataactttgtactgtagcagtacaatgttttgtctattaagaactaaaggatgggcccataactaagatgggagggtgtatagagttatctgtatattattggttaaattagcatgtaacgttctacatattggtttagtatatgtaaaaccttttgctctgcttcagcttatttgtgctctgcttattgatatctttatgttaacacacagatatatccatcttgcgctgccattgcttccaatcagagaccggattgatcaatgaacaatatggaggcggcactacctgaggacttgctggccaacgtccttggccgcctcccaccgtgcagcctcgccgtgtcacgctgtgtccgcaaggactggcgtgccctcatcgacaaccgacgcctccttcgtgctgacctcctccctctccgcctcgacgctttcttcttcaagggccagatcctcacgtctcacccctacttcttctcgtcacgctctacggcacgccggatcggtggccgcctcgacttcctcgacaccttcaatgacgaagatctacagatcatggatcactgcaatggcctgctcctgttcttcgagcggctcgccaaccctgccactcgccaatggatgcacctgcctaccttcccgatgtcgccatgcgtcacgctgggcttgcgcacgggcttctgcctcgtatgatcccatggtatcgccgcaccactttgaggtgttttgtgtccctttggttcccgaaaacatcttctatagaagcagcgataatttggaccccgacagcaacagcagcgttgatcaggagtcattagaatggccgttgtcatcgcggtgcacaacacacgtcttctcgtcgaggaaatggaggtgggaggagaggtcatttgtccgccaacaaggagtggagcctgccaatgagaccattgccgacctacaatttcatccccagcaattccaacgccgtgccttatatttgaagggagaaatttatgtgcaatgcaagaacaattctcttatgaggtaagtgaataaatctgtgagcttttttaatggtactagtaaaaacacttagaacttcaatgatagaagggtttgtgaacataataaatgttaaaaaaaatcatttaggacaaaatatagttggttcatgaaacaaactgatgttgctggtgggtcctgtaattatggacaccttcacagcttgctacctagcacagagagccagtctccaagccagaaatataaaactgaaaaagaaatactcgctccttgtatgcatgattttactgagaaatataaaactgaaaaagaaatactcgctccttgtatgcatgattttactaacatgctttcttgttaatggctcaacctcaatttgcagaataaccctgtcaaatgataagtaccaaatgatcaaatcgccagtagagagcaaaattgatgatggcaacggcgtccttcagttgggaaaatcagagaaaggagtctactttgtgttgcttatgaagataataatttcccccaatttcaagtttggttgctcaataaatcttcatcatgtggtggtcaggttgagtgggcgttgaaggctaacatcagccttgaagcaattatggataattttcctcttaacactgacaatagtttcagcagaccatggatcctaaactatgtgaccgaagaagcaatacgaagggcacaggaggaggaggaggaacttgaatgggactttgaaaatggtatcatccttgaaaccaaagataaggcggaagcacaccatcttaataatatttattttatagggtttcatccttacaaagagattgccttcttttgggtctcatcatcaagagtgatatcctatcatttgaatacctcaaaggttcaagagttgggcatcttattccatttacccggtatagcgcagtcatttctatacacaccgtgctggatggaactatttgaaaataacaattagctgctagctagtagttactttatcaaagttagcacgtattcatacacatttaaataaatatgttcccttttaatatatatatgtatgaacgattgtttaatttaataattcattcctagctccttgcgttgataataattagagtgatgcgtgtctcctattttattagggttaaattgatccgtgctattacaaatgtgctctgttactgtcactgtcgtgtttcgtcgacgggtcgagtggtgatagattatactcttgttttttttaaagtagatgatgcatcggaacatgtaagacacgttaatgatggggctgtattttttaccattcgtcctgttttaaaaagtatataaatattatttattttattgtgacatgttttacaattaaataaactttaagtgtgacttatgttcgcaattaacactattttttcaactaagatatgattaaacgttattttaaaagtcaactgtactaaaaaatggaattagtatatattgagtaaattgtactgcacttggcctacgcatctacttcctctgtttcataatataaaactttctagtattacccatatttatatagatgttaatgaatcaagatatgaagggatatataattatatgcttcaaaccactctttaattaagctatgttttactttgagctgccaaaacgctccttaattacgtgcgaccaagataacaacagcataatgttttaacgagacgtcaggcttgttcacttgatagacaaaatcaatcttactaacatttggtaataccgaattttagtttttttttgtgtgttataaatttttggtagcattagatatgtttagtccgaaacctttctaaaataaatttggtggtgttttttagaggaaacttgtaagttctgttttttaatggaacttcattccaaccatcacaacctagaaaaattggacaacttcactctgcaattggttcactgacataaaggtttctttcagtaaggtcattccagttgtttgttcagtggttggttgctctagaacaacgacgtgcttcattaaaaatgaatgcaatccattcagtcgctttactgcagccgatctcctgtatcaagaatcaagagtcaagacacttttgtttcatagtagtagctcatccattcctgccttacttctgatatcggccttggctttttttgcctgtttagttcccactcagaaacttttgaccctgtcaaatcgaatgtttggacacatgtatagagtattaaatataaaaaaataattacacagattgcgtgtaaattgcgagacgaatcttttaagcctaattgctccatgatttgataatgtggtgctacaataaatatttgctaatgacagattaattaggcttaataaattcgtctcgtagtttacaggcggaatatgtaatttgttttgttattagtctatgtttaatactttaaatgtatgttcgtatatttgatgtgacacgctaaaactttgcatctctagttctaaacacacagccttttggcacttcttcttttccttctttgagctgtttatttagcagttcagacttcagagttcagaggtctgcaggctgcagctgcagtaaggctaaatggctggggcttcagagtgagtatggctgaggcttttcctgacaatcaaaatgaagagttattagtgcacgattaattgagtaatgattaatctctatctctactattataaaagttaaaaatattttcgctaaaattttcgtacgtcgtacgtatttaagttgattctgtcacccgtataactctaaaataactattatacaccctcttccccgcctaacggcctaacccctccccctccctctcccggtccaacccaacccaacttacctgtgttttctgaatgcgcgaaacagaaggagctgaattaacctacatgacctgatttttgcctgaattctgctcttttcttagacatgttctttggtatttttatgcaccctgttttatttttttccacaccctctatgaagaaccttgttgtatcagtactgtacgtactgtacgtatatgatgcagtagtaactattgttaaacaggagaaaaatgaaatgtaccggccggacggaagaatggtcatattttctgtgtcagtcaaaacagaagaatgatcatatcttcactatgagaagttgcccatggccattcaagccactatagtgtagcactgaaccatcacaagcttgaaaaattagaccactgcactgaataatggcttgcacaaagcaatgacattctgcaaatggttcactggcattaaggttttctaaactttttcttcaaactttcaacttttctatcacatcaaaattttcctatacacaaactttcaacttttctatcacatcgtttcaatttcaaccaatcttctaattttgacgtgaactaaacccaccctaagatcactcactctagttgttcactgggttggttgccatagaaccgcacatgcgccgtgtttaattccaaaataattcttcaaacttctaacttttccatcacatcaaaactttcatacacacataaactttcaacttttccatcacatcattccaatttcaaccaaactttcaattttggtgtgaaggctcagtaaaaatgaatgcaatccattcagtcactttactgcagccgatctcctgtatcaagattcaagacactcgcttgtgtttcatcacagtagtagttcatccctgcctgacatcatctgatatcgcaaatcttcatgtgtcagccttggcttttactcgagccattgccacttctttttcttctttgaattaactgagctgtgtacttgagcagttcagacttcaaatttcagagacctgagttcgattcagctgagggtgtgtttaattcacaccaaaattggaagtttggttaaaattggaacgatgtgacggaaaagttgaaagtttatgtgtataggaaaattttgatgtgatggaaaagttggaagtttgaagaaaaagtttggaactaaactcggcttgaattggtgttgcttttcctcgcacataaaacaagttgagatattaacacatgattaattaattattaattattataagcttaaaaaaattttatttatttttttaagaaactttatatagaaaattttataactcagcgatgggtcgggcatattgggctttttttgtgcatatacacacactaaaagcccattatgatttcggcccaaggcccgctagcccgtaatccgtacgaattaggatgccacgtggcatccctctcctctgcttcgagaacttcctctccgctccctctctgctctctcttttggcccaagtccctatcacattgaatgtttaaaaattaattttaaatattaaacgtagactattaataaaactcatccataattttggactaatttgcgagacgaatctaatgagcctaattaatccatgattagcctatgtgatgctacagtaaatattctctaattatagattaattaggcttaaaaaatttgtctcgtgaattagcttttatttatgtaattagttttgtaagtagtctatatttaatactctaaattagtgtctaaagatagggactaaagttaagtcactgatgtaaacaccacctttgtctcttcttcttcttccgccggcttctcttccaagcctctcgccttctccctcccgcgctcgccgccaaaacccctcgaaaccctaggctgcttcgcttcctcctcctcctcctccgctccaatggcggacgtgctcctcccggagctccgctctcctcctcctccgccgccgccgccgccaccgacaaatgatgatcgcgcgcgggcggtggacctgccatcgccgactccggagtgtgacgatcgctcgccgcgtcgtgagctggggcgctcgccggaggatcacggcgtgccgctccctcccccgccaccgctcggctcctcgcgccccgagcgcctcgccagcgatcgtccggaggagggcgcctccgccgccgcgcagccgtgtggcggaaggagtgagagccccacggcgaggtccatgtggccgcggaggctctcccctgcgtcgttgccgccgcgtggcgggaggaggagcgagagccccacgccgaggtccatctggcggcggctctccccgtccccgcccccgccgctgccgcccttgcctcccaagcggccgcgcttggacggccgccgtagcccaccgcgcggtgggaggtgaggcggagggaggacgttttggtttaccttctcggctctcgtcggtgtttgatttctcctgcgaagatctcaagctaatgtgtgttccgctcgcgcgtgtttcgtgcagattcggattcgagcacgagcgaggcagggaaaggagcatgaacacttcgcgtcgcgctccaggtgagctatacttgttgaacattttcatcctgccccttctgggcgcaggcatttccaaccaaaatcgtgccctgctacaagtttgcatagcatttctcaaagcagagtttctggttgttactttgggattgggaagggatttctcgagcacttagacagatggaaactgatcagtatggtttgaggtctccttcatcctggattcctggtagctcaaaatctctgggcttgcttggaggccaatgtgagaattttttttctcattccatcaaaacaaatatactctgtgtacttcagtagttctcatggtgaaatggtgagtgtaattcgtcagttagtgctttggcacgcttttcgagaacgaggagcctgggacattaagcacttactaggtgtcttgtactcttgtgtgatttcataatactcacctcggctgtcaactcaatgctatcagaattgcagcatgcatctttgtattagtgaaaaatttctgatgtcctcagttttaaaaaagaactatgccatcaatcaacactaattttattggcacactagtaggtgattatcttgttgagttacctatacactttgataaataggagttggcttcaatacttgtaaatttacttgagaacaagagagctagtggattgctatcaacatcgtgcatgtttcttgttggcttacctctagtcacaattgaagttcttagtatgaagcattttgacatcgatctattatttatgattaacctacttctgcagtattagataaaaagttaacattaatactctctctctctccccctctcttcattagtaaaccttattggttatgtgcatgaggacataggccggagatataaacaatttcaatgatctaataataattcatggtccttcatgtgagtatgtcttgtaagaacgacgattcactgctagaagtcttaacacttactgcttttcttctagattgcctggattctggatgtgatgccccctataatggtcaaagtaacacccggaggtatgtatatgattgccctatcatggtggtagttttgatctgttaggtatgttgatattgctattacttccaagtaatttgctagtgtggtgttgcattttgttgaacttttccttcctttttgtctttttttccgttttaaatccctcatatattgttgagtggatggagtgccaattgtatgagatcttatgtgattccaaatcatttcaggaaaggattgatgacatacaaacagtttacccaaaaacttgaagatgatgtttcaccgggtgaagctgagagcaggtatttattaacaaaaagttacacaacattccagaacttgaattaatctgttgtactagattgcacttaaagttcagtgagctatttgtctaagtacactgttatcaacttggttaacaaggtaccaagaatacaagacatcatacattacttctcagaaacaggattattttgatcaccataagaatgaagatcggtatgttcaaaatgcacttcctttccttctggtggtgttaattgtactttgttaagtaaattggtattgcaggttcatttctttgtttttgtaattgcagtttgaaagacatgtaccacccaacaaacttattatctgttattgaaaggtaataataagtttgcttaaagcttcactcagaagtttacctgctgtcagaaatttcgtatttgaattcgtattgagcagcattcataaaccgaacagcgcttttttatgtgcgctattcatttcgctcagaaaaggttgtgttgcttgttggtttcttatgtctgtttttatttcactcaggcggaatgaactttgcaaggctgcagcgaagaatttgattcttgatttgcggagtggaactttggacctgtgagatgaatctatgtatcatttatgttgtgaatgattaatcctatggtatttcaagttggttttgctgatatcttgattttcattggcatagtggtcctggaatgactgctggtacagcaagtaaatcaggaaatgacagtgatggaatccctgcagatgatgaagattatcacaacaagagaagaaggcatcacagaggtcccctggaagaaactgaactagtttcagttgctcctaaagctcacccagtcagttcgcattatcgacgaattcaaactgacatacatcaaactctagccttagtgaagaagcttgatgaagagaagggtattgtgggaaacatcctgacaactggtgatcacacaaagtcaaatggtgacaaatcatatgctggatctacagggcctttagttattgtccggggcttatcaactgttaagggccttgatggttttgagctcctagacactctccttacttatttgtggcatgtccatggtattgattactatgggatgtctgagagtacaaatgcaaaaggtcttcgtcatgtgagagctgatacgaagaatgccaacatggacaaaagcagcgctgctgattgggagaagaaactggattatttctggcaagagagactgacaaacggcaaggatcctctagttgcattgactgccaaggataaaattgatgcatcagctgataaagttctagaatcttatgtcacaaaggttaaggatgataactacggatggacatacggctgtggagccaaaggatgtataaaagttttccatgctcctgactttgttctcaaacatctgaacctcaagcatcctgatttggtctccaaattgacttcaagagtccaagaggatatctatttccaaaattatatgaagtatgtatttagatctccaaatgcaaatgacaaattgttatttccgacatgtcaaaaggtaatgcttctgttgttgtttacttttgatgcagtgatccaaatgctccaggtggcacaccagttatgcagcaacaatcaccagtaagaaactatacactgtttagcttgttccttttcactgatatgcttaagaacattcccttcttgtttgtatggtggggtgagaaaagctataatactattcttaattaactctgaaactaaactaatttatctgaactgtttctcggtcttagaaggtttacattgcaccgattgttaatttcttccgcaatttccccctttgagatgcttattttcattttttagttgtttgtgcttatcataaaaacagtttgtttctttaggagtttgtgaaatgtttttccatgtcccatgtttgactaacagatcaatagaaattcaatccataatttgttgtgttcacctgtcactagtgaagctctatgttgtagatctttcaccttatttccacattaatgagtaatcgatgacaatattttacttcttgtaatatttatgtatgtgaagtctctgatgtttgatactgttcgttcttcatcataatccatgtaacttctctagtgttgaatgttcttaattttgcatttcaagtatatttgctgggggatattaaacgtgcagtgtatcacttgaaacttgaaagtgttgtgtattagttattgaaatcctaaacctgcagtataatccttatttataagcccgttctggtttgcaggagcagcaaggacctacaccttctgaactaacgcctggtgcttttggcgggcagggttccttcgttgaaatgcccactccaccagtactaatacctgtgcctggtgctgggtaggttaattatgttatgccagttagctaaacaattaagtactctacaaaaaggaaaaacaagtcagttatcaagtccaggcacaattctaactatggttgtcttggtttcagtccattgggtccatttgttcctgcacctccagaggtagtcatgcagatgatgcgaccagtgatgcccatgtatccgcctcgtccgcctaaccctcgtcgtctgcgaaggtcagtactgatcaactaaagtttgattaatttccccctaaagaacactaagcttaatactttgataaaaaaaaattgccgggtccgcggaaggacgccgacctactttgataaaatttggtatacgttaggaaatgaaaatccgttaacaacaacatggttagtttttgcactttcgaaatgatttgctaaatacgatcccaatgactatgcaatgctccttcctctcttgtccttgcctgtttctgcactggtttactgccctactatactttctactttgtgccagcttctcttgtgatcttgtcctattgcatttgattgtggaagcagaaaacatgatacacctttgtgtcgaacatatggatatgcttcgctgtagtttctgttgcctaactctctaaaatttaaattcatgatgttggatgcagctacaaagatcttgacgctcctgatgatgaagtcactctcgtggactacagaagtttgtagatgcgcgtttcgtgttaaccagcagccagcaggctaattcggtgatggttcctccagacagcgtaaaatttttctaacaactgatatgaaagcacgattacttcccgttgctgccacaatgaggagacggacgacggataggaaattttcgtcacgtctgacacttaagatgcgtgtcgcttgaacgatcaaccattctatcatacatacattgatctgcccctgtgttttctgatacttgaatgggcaacagaagttacgggattaacatgatctaatttgccactgtacatgtttgctgcaggatgatggaaaactagttattcttccctcttcttagacatgttcttttggatgcactccgtttaacaccctatatgaagcgagaaagacctctttcttcttttttttcctattaactatatatctgtctggtggataatggtttgcttaacacagaccgcgttacaatatatgttccctttgtagtttctattactactccctaacctttttttagagaatatcactccctactcagcctcgacgctttgagagttcgatcatgtgaaagacggaatacggttgtcgaacgaaaagggtaccattcaccgattaattagaatacgaacgattaattagaattatacgaaaatttaacgttcatgaatatatgtacaaattttataatattatatagttatttgaagatttagacatgtacaactatataaatcaaatatgttcatgttgttttataattaaaaagataagtaaaacattaactcttctaacactggatttatatatcacatagtttatatatcacatagtagtagaattggttgcattaaataagtagaatggaattcacttcacttgcttatgaagatgggcccacattggatgatgggcttttcttagttgtgatggaccttaggatatacggcctggattggagctgacgtgccttgggcccaactttctgcggtattgcagcccattaaaccttccttgttattttctgaacgttgatatatatgtggtcagagcaaaaaatgaggcaaaattaaccagttaaaaaatgtaggtcatggactgctgcagttaattctagtggtattcaaggtgtgttctgttgccatatcaacaatggacagaatgataggtatcttttatttagtcttttattaagtccggacacaagtacacaactgatctcatatttgcaagcaaacactaggaattcaaacagcctacagtatattaccataagagctatttatgcaatgagatagtctgtctggatcactgctgctaaaaaagatgaaggctccatgaagaattgtaggattacattaaacttggcctaatgttggcacttactcaggatgagggacaggtttcccttatgtccttgatcagtagttggaggaaacacaaactgcaggggcttaataactcatcagcgtgccgaagatgcagactccataggatctttcaattcattctgcagcaatgcacacatgaatatatacataagagagtacaacagttactggagtagtaaatggacatgcctcacctgaactgacatagatacaaccccagtactaacaaatcataccagatcatagtacaagttattgcttgctttggcaattgaacctaacacccccatatctgacttggctggaacaagtcaattttcagcaagaacaggagaagtgcggcattctggcctcttcaattattttacagtaacatcaggggaaaaaaagcattgcgatagggctctcagattgcataactatcatgtaactagagtatgttcaggtgtatatatgctccgttttgccatctcacagaacttctgcacactgagaaatccagggaccgatatgaaccagtaagctgccagtgattcttcaaactctagcttttcatataatacattgcatatcgaagctcagtttgtagcacattgaacatataaaataaatgtctacagcccacctaaaatgaaaccaatttttacatacactacacagctgattaaatatcaacatgtccccacagaagtttctaaatgaatggttatggtgatagggacaataacataataacagaagggaagacatttgataagtaggaaatgtcccaattacgcacattgtcccccaccatcttctgttcaccttcaccatgagaactatagaagagcctatgttcatatgccaccaatattctcatcacaggttcactattgggcctcacgtccagtgtggagcaatttgctgactggccgaaaatgaatcattgttacatatcccattattgcataaatagtagaaccaaccatttggttcttcaaccaaagctatttcactgtagaagcactccgataaaagcctgtcatcgcactggtaatcttgtcatttgtgtgcctgatttggaagctcccagccctcctgggccggggaatgaagagcgcactgagcatcttctccaaaccatcaactgtgtactttacatacttgctagcactaacatcctgctccaccagtggcccatagttctgcatataactccggtaagcaggaacaattgcctgaaccacaagaccacatgtcttctccctcaagtccttctctggtataacccatgcagattgtttacggaacatctcatcaaagctcgcattgaatgttttaaggcgctgcttcaccaggtcctttgccgtggcccggcccttggagaacaagattagcccctcccggttgagcagcggtgaaaccaccccccaactatccctcataaacaccgtcagatagtagtccttaaactgttcatgctcttgcagccacgcatcacccaaaagctcgcctaacctagtagccttcaagttcttaaagaaatgccagtgtgtgttcatcatgaagagatatgacagtgtcacattgtcatatgcctttgaccagacatcaaaattagcttcaagggccttgacgatgttaagcaccgcgttaacaagcatcttgtcactgaatgtctctttgcgccaactgcgatggatggtgagaacttgcgcaagcacaggcctgtacttctcactaaggaggcgattgcagtactcaaccacaaagctaactagtcgcggcacacccccatcaggtgggggaggcatgtgccgctgcagctccacctgcacaagcaactcctcaaagatctcaacagcaccatccactaacaacttcacaaggtcccttgtttggttctgaatctctacacacgccttctttccaccaaacaaccggttgaagtccaaccttagcttattcaaagaatcaaacacctccagcaaacgcaggagcttaatggggtccttcttcgcatcagcagccgcacgaccaaagctcaagaaatcaagaatgccggcgtgcgctgcaacatcagcgaagcacgctgatgcgtcatccttgcgctgcccaaacaccttgttgcagagctgtcgctcggactcaagaaggcagcgcaccacaaactccaaatgccgcccccacaactcaactccagggcccaacgcctgcgcgacgtcgaccgggtttcgcaagtaatcgaggccaagggcacggaggctggcactcaccacgcctccgcgggcatcagcatacacggacaaacaacggtcctgcctgccattggcaatgaggcggtcaagaatcaggctgagcttgtgaacggtcgcggccgggatgagagacggcgcggcagtagatgcagaggttgtgttcagctgctgcatcgcgagcgggagcggtgcagagtggtcggcgagaaggcggcggaactctgcctcgagcatgtccagagcggccgccaggaggccaccgtcgaggtcaccggaaggtttcttgagcccctcgagggtgacggcgaggtcggcgaggaaccttgggtcagcgaggtcatggtcgccgaggtactcgacgatgtccgcaagccactgcgcggcgaggccggagttatcggagaggaacctgagggcctcctcgaggcggccgagcacggcgaggtaacccgcgaggtccccggcgacggcgcccgcggcgaggagcggcggctcgaggccgtgcacggcgtcgaacaccttgagcacggccgcggcggggccgacggcgcggtcgatgtggggccccgccgcggccagctcggcccgcggcgcacggatcgggcgcacggcggcctccagcgccggcagcgcgagctggatctcctccacccgcggccccgcccgcgccagcgcctgccccagcgcccgcgacttctccaccccggcacgcagcgaccgcgccgccgccgccacgctctccatctcccccgcgccgccgccgctacaggctacagagcgagatggcggcaaccccgccgccgccgccggagaccgcaatgtagacgaggagtcctcctccggtcctcccctttctctctctctcctccacgcggcttcgagttcgtcttggtgggaggagagaggtttggggggtttaggttgaggagaaggagaaggtggtagaaagagaagagagagaaagaagccaaggagaggaaggggaaaggcatgtttgagaatggatggacgcatagttttctttttcttttttaacaactcgtagtattaatatgtgttatatcgttaatttattttaatgaattatatattactttattttttttaaataagtttattttttacacatcccacacatactaataaaaataaaatatatatataatttacctactttatcaaatcgcaatataattatttcacaattatctatttttaatgtaattattctctattttcataaactctaatacaacaattacttaaaggggcaattgtttgagtacaaataagaggggaaaatgggcttgttatgagacagagagagtagagaacggggagtattatttatgatactgtattattttcttgacaacagaatgtaagcatactgcatgctcaacaaatgaagaacagaattagctcatagtcttcataaaacatctctattagtaaaaacacaatgagtccatttgcaattaacaggtctatcaattatataattttatatttatcacttattttgaccggtttatcagttatgattaaaacaagtatatatagtcatggatcatggatgtagcattgtttgaaccacggtagctggagtctacttgcatatacttctacgtccggcatgtaacccacttgcgaattcgtagcagtattttagtgctatttacatggtaatcatacacacattattatatttctctttcgaataaaaagaagcatgtcagtagctggatcttgatcttacatgaatcatgaccaatattgaaacattgtcaaaagggaaaatatattcatatgatcattacatgtggaatgccagaatatatattggatccaaacccaatgggcaatggcccaggcacgtgccccttgcagcactgctacaaggtgacaaatcacaacgggctcaagaggcaaacattccagtaggacccctttttttttcttctcactttctaccggactagcacatgcgtatcatctgcctgaagatttctgaattcgtaacatgaaaaaagtttggactttggaaccatatgtaataatcaagttcacattatttgtttaaaaaattcaatccctaaagatttgatgccagattgaaacgatgtttataatagtatctaatcaaagttgtagtttggctctttgtaatctggcatactcactccagtttgacaggcttggatggccttttgctcatgtgaaatccggccacaatttgcatggattacggctaatttttgtcaaaagctgtggttagggaccaacaagattagtgggccgcatgtttcggcccagttaaactaaaattgcccttttggtgggctttttcctgggccttttttctttctgaatttctgaacatgaaactgaactttctcttgttctgctacactcatcacctctgatattccttttcttttctttcttcttcttttgtcttttggaatattttcatcatctctttctctttttttgccaactcatcagattttgtcacagtatgcaaaaggcaaaagaaaaaaaaagaagataaaaagaaaacattttgcggtacagagagaatacatcttgattgatggtcctgaagatcgcctagtacacgagccacattcctcttggaagaaactgctgcgagaatctcaccttttgtacaacctttttagagtccatgaacactatctagcagctggcacacactgatatgtgctcagaatcaagtcccatgctgtctcaacaaacgacataacctactgttcatagactaagtcacgagtatttttcttgtacccaactattcgtgacacctgtttggcaaaatcatgcgttccaactcagggtccgttcagatctatttggaacgttaaatggcaaaagttttggtggcaaaagatttggcatggagttgatgtttagatgcattttaaagttttgtcattttagcacttgagagagagagcgtggtcctggagcattttttggaaaatttgctactctagactagcaaatgacaaataccaaattgccaacttttactactcgtgtttagatccaaaataacaaaaagtacaatcccctaaccctgtagaataaaatggcagactaccttgcaaagaaatctagaaataccaatcttcgagttactacccaaaccatgtatgtttgtcaaaatatatctcatatatgtcatcaaagatgctgtcatgttaaggaagctctcaactcagctctagtagctgatgatgtaaacctaatccatgtcttttaatgtttaatatattatgttcttaaaaaaaaataaccctgtagttctacggccgcgtttaaaccaaaggttcgactgaattgatttatcagacacgaaacgagacaaatcattagcaagtattaattattaagtatcactataaaatttttttaaaaatatttatttgattttttttaaaaaacttatgtatatatatttatgaaaaacgagtaagtagtccatccaagtagttgatataaactcagccgtacatgtgcatgtgtttttccaattaaccaatttggatttatttattttttggaattgaattaactcaccgaaatatatattcagtggtggccaaaccaactattggataagtttgaccgtcaaccaggcttattgttattagccaatgacaaatgctattaaattgtttaggctcaatgtcgacgccgctagctagcttcatcactgtatatattgaccaattgttatttgaaaatagacatacacaaataagtttttttcttcattccattaataatattcagagttaggttttacaaggagctgcagccaaaaaccatgggagattcatccactgattttgcaatgatgttttaaagatgacttgtccatcttatttttctttctttctttctattttttattttagagagcaacctgtccaacttccactttgcagcatggaggaggacatggcaatggagaagaaagaattgagaaacctcacctgatggatacaagggttgaaaggtgtttggtctcttctttccacgtcacacgtcttcatccctctctgcgtcaacttggcactatgaatagaaaacgagatgtcacatatctctcaccatgtctaccactagagctacagttggtgctcaaaaaacaaaagccattattagagtttgctacttttttgctggtctttctcatctttagcttaaacgagtactactactttttttttaattagctgacacgtaatgatgctacatgtgtacatgttaataaagcgtgtacaattaattaactaattactaaacaatatctgttgcacaaatacatagtaggatgtgtttgacatgagagaaaaggagaaaattgagaagatacgtaaaacaagatgagtcattagcatatgattaaatattatttaagcttgaaaatatgattaagttactttaatataatttttaaagcaaattttctatacattttttttaaaaaaatacgcattgtttaaatgggaagcgtgcaagtgaaaaagagagatttcttttctctttatcctcctaaatcatccggttattggttattaaacgggaaacctctattaaggggattgctattcattgaaggtttttctctttcttatcttcaagtactcttgattaattagctgacacgtaatgatgttgtatgtaagcaaagtgtgcaattaactaataaaaaaagagggtttattatataatatctaaattatctagctgttcgttattgaacgggaaacatctattaaatagatggttattcatcgtataaaggtttcgctttttttatcttgaagtacttttggttaaacagctgccatgttatgatgttacatgtgttcattttgagtaaagtgtaaaattaacttattaagcagtaggaattaataggtccattaaacaacatctaaagcattcaacacacatgattactgaaatgaaacctttattaaagccatcctcaatatggtgcttacacgagagctggcaagaaaaaggtatttctttagccacattgatgattcgaccatacgttaaatcattagcagtcagtgctttatcaattatggatatctattggtatatatgcttagggcaacaccaatttatatagctaaaataatccatatagatgggacccacatttgtggactttaactattgcaacattcacaatgtatataggtagtaagtagtaggaggaggagagaggaaatagagacaaatgacatattttattctatatgggcagcccatatgcttatggatgacttttgctatttctctcctatggactacttttacaatgtggttaggtagctgaatgtattattttattgactatggactggttttaaagtacattgtggatgcccttattgatatatctatgtctaatggtagcatattctaattcatatatctgacactaatttctcatctaaaacacccgtttaaattgtttagttaagacagcttaatggcgtggcaactttttttttcttcttctaaacacacacggttaatcattttgtattggatgtgtctaagaagactgctagtcatagaagggttatcagatataacccactattgccaatgagtgacctttctaatttgattaaaaaagaaatcgttgtatgaataacaaaatacaattgagtgttcacaaaggtctcatcaatcaaaacatgctgcaaaagctaaaccaattaccaccaagcaataagacacccaaatccaattggaattgaccaaaccaagagttcatcgtactgtccacaaacttattaaaaaagcacacaccaaaatgagcaatgttagttgctatagtagattaatgggagtgtttgagaggagagaaaagaagaaaactgagaagacacccaaaacgagataaaccattaggatatgattaattaaattaattatttaaacttaaaataagattaatatgatttttaaaaataacttttctatataaaatttttacaaacaaaacaccgtttagtagttcgagaaccacgcatatagaaaatgaggtctcccgatcaacttgcaagaaacaaagattattacgtcatcgtcccaaattagttgtctttctaaaatactgtaaaatttatctcaaaatagttgccactcttatgtatactatgatagttgtatcaatctattctcatttaaatttctttttattttaatcatatctcatctttctgcccatgtaaataaggaacattataggcttttattcttatattttaatatatgaatttgttgacgggttatatacatatagatggtatggaggcggaatcaggatatatgatctacgagacgccggataactgattagttagtgtgagacggatgaagcagcaggtgagagagccaaaaaccagagagaaagcaagcaaaccacagaccaaaaaaacaaaaaacaaaaaaagccaacggcgcaatgcaaataaacggaggtgtacacgcaaactgcaaacgaagcctatggccggtgaccatccatccatccgttgacccggtctcctccccgccacgtcaccacccgccgatcattcccatccactcctcttcttcctcctcctcctctctctctctctacctcgccatcgctctcctcctcctcctccatccattcccctcctcctcctcctcctcccatgcatgggaggccgtcgaggccattagcttcctcctcgtcgtcgtcgtcgtcccgcgtcttctccttcttcttggcgccgcgggttttcttgttcttggtggtggtggtggtcgtcgtcttcttgccgggtcggtcgtcttgctggtggctggagggcacggaggagttggaggaggagatggggtttgccggggactgctcgccggtcagcggtggcgggctcaggtgcgttccttcgctcgatcttgggctttcttgacttgaccctcttttgtgttgccgtggtttcgtgttagggggaagatccaagaggaggaggaggaggaggagaaggatgacaagtttttcatggcgcggtcaggggctttgtgcttgatttgattggcggctaactatcgagtagtgattcttgaatcagaggctaggacatgaggtttcagtggcggattttgaattagatctgcccgattttgctctgaattagcttagcctaatcgggttccagctcctggctggtgtgaggatgtggccatgattttgaatttgaggagtgtttgaaaacgaaaagtctaatcctttgtaagggcatatggtagaggaattaacctttttcttgtttgatgtgtctgtgtgtagcaactgatttttatggagtgttattagttgtagggatctgtagtctgatctgatttggtaggagctccaaaaaaaaaaaaacattcatgaaataacatgtgagaaattgatttatgcaaacaagttctttttttgtccatttagtatgtagtaacagttttgcgccatcggcataaattttcctgcaaatattatcctattaatgtaactgagaacatacagtactgctagctaataaagataacacatttgattgtcacacgaaattaagtgcactggagtccatgattttagattttgcgtatgactaattaataaatgttccccttttctgttgacagtgaaaacggcaagttcagttatgggtatgcaagtgctcctgggaaaagggcttcaatggaggatttctacgagacgagaatcgatggtgttgatggagagaccattggattatttggcgtattcgacggtactgtacagttccacgagaaatattattaattgtttgggttttggtatgtcaggacatccttgatcaacttacttggttgtacatataggccatggcggagctcgagcggctgaatatgtcaagcagcaccttttcagcaatttaattaagcatccaaagttcatcagtgatatcaagtccgctatcggtatggcattaataattcatgcattacggagcaaaaataattgtagccaacctaaaaggtggttgtgatttctctgtacttttcttgcagctgaaacgtacaaccatacagattcagaatttctgaaagccgaaagtagtcacactagggatgctggctcaactgcctcaacagctattcttgtaggcgatcgcttgctggttgctaatgttggagattctagagcagttgtttgtagaggcggggatggtaagtcactaaatctaatgtgtgtaacatacttcagttagtgtccagtgttttcctctatgtccaatttcagcaggatgcttgagaaggcatttgctgtctttcttccaatttccatggttggggtacatggcagttcaaattatctgaataacaggatttcatattagtattatttaacacatgttaatcaatcataatatttctcctgtccacccttgcagcaattgcagtttcaagggatcacaaacccgaccagtcagatgagagacaaagaattgaggacgctgggggcttcgtgatgtgggctggtaatttcatgattcctttgaaattatctattttgctttgtacttgtaatgatcattggttctttctaacggttgaacgactttgcagggacgtggcgtgttggtggtgttcttgctgtttctcgagcatttggtgataagctattgaagcagtatgtagttgctgatccagagatcaaggtttgacttaatttgtttgcttagctctcaactaaagccttctatctgcaaaataatattcatcatcgtaattggcattcccatgcatgttactctaaagtagtccaccaatgaactctactttctacctaagttcttcattgcttttatgcaagaaagcaaacaatgagcctgctccatcaacatatcatttatctttccatttggtaaaagaaatgcatcttgttttatttacaggaggagattgtcgatagctcccttgagttcctcatccttgctagcgatggactttgggatgttgtaagtaacaaggtaacaacagaaatttcttgagtctccttcacccgcttgtatgttgccattggcgccttatatatgttactcaatacatgaaacccaaattctatttccaggaagctgttgacatggtgaggcctattcaggatcccgaacaggcagcgaagaggcttctccaggaggcgtaccaaaggggtagcgccgataacatcaccgttgttattgtccgctttttggagggaacaacgactggtggtggaccaagtagggaggccgccagcgaccaaaactcatagtttctcccaggcagcagcatggcttgttcctgtctgtcatatctgatgctcaaggtagacgattacagtggcggcaccacccaccatgctgccaagaactgacccggcccgaatttcgtcctcgctttcatgctcctggctgaccttaggtggtgatggtggtggtaatgtaggagcagaatggcgatggggccagtgttgttacatatgatatgatcgaaggtgtatcgtgtcttatatataactttgcaatgtagattctatgcttgtgttccatgctaggtctttttttttcttttttagcatcaaatgcatgtaatagaagtaaatttaaacgatttgaacgaagttatacactgcagtatgtaacgaaatctttgcgtttgtatttctgatgccatgagcattatgatttctcataagctccgagggtcaaaactccaaaatctgtctggttttgtggttatgcatcaggaggaaagcttgtatcaatagctctctttgcttgtggtcattgtggatttgtagggaaggaaaataagaaaaaagaaaactcccgattaggggtgaatacggtcaccgaccgagtgttgtttccgtaaaagggtaccattttggaccgtacccttttttgctatttataaattttgtttttctaatttctttttacatcgtattaatgttgacattgaatatatggtcaattaacggtcgatcgagcatcgtttctgaagataagctattgattccgaccatttccgatcattttcacgctactcccgaatgtctcgtggttccatgcacaaaaacatattcgatttttctgtacatgaaagattttctgtacaaaaacatattcgatttgacagtttgacacacaccacgatttattattatgcataaagagacagattagcgataaattaccgaccttgttaagatcgtactaaagctacaccagcagcgtgaatataaccataaacacgaggatttaaacctgataggtaaaatggaggcaatcgtcttgctcaagcgctccatgtattcaaaatggctgcagcgatgcagaaatgagagggaaaattagagcagagcagagcaaatcagctgctcctgtctctcagttaattttgtaccaggcatgcacagtaagtagtgttgattgattgatacagcggttttaaactttgtttttttatttcctgatttgaaattgaacaagagtagagagcttgagaacaaacctgtttgtgtaattctatcccagatcggcaaggaactccctgcatccagtggaaaaacctagcaaaagactgccctaactctgcatcaagtagcatcggttacaagcagaatatgatgtttactaccaggacagacattacttactccagattaatgataataaaattcagaatacatgcatggtaaattggtaacagcatgagaaccaatgctggaaaacggattaaccatacaagaaagatgacagttaggatcactggacaatctaacaacacattgagtgcagcatgtgtcctgttctgctagtagaagactcatagtagcatgggtgcagtatttagttatagaatgaaagacccaggatatctaacatgtatattgcatgccagacataagtcactaatacataagtaacatcatcatgattaataaataagtaacataagtcactaagcatgacatttgataaagacagggatgttgaataaacagtggcagaaagtaattcgacgaagatagcaatgttgagacagtttcagttaactttgcagctcactaggcctgtactgaaatgaaattgagttcagcaagaaaataccttgtgcttgaactgaaccaagattcattgtgaataaatctttcaagtgcacttgaagaagaaggccaagcttccccggcaaagagtggttgaagaaacccagaatcttctgactcaatgttcagcttaacaccgcaattaccagcaaatgccatttcaagaacactcgtattaagacctccatcactaagcaattcctaaacggcctcaaaacctttctttaagatatcctaggtcaggtcaatgcgcagcaaaactccatccttgccaagcttcaaatcaagagttactgtaaatgttttttttcaaacaaccaaacagattggttggtgttatatttatagaaggggttaagttacacagccgaagactggatgaaaaggaaaaaaaactgtacaattctgacggcaaacaagcttgcacgtcagacctttctactcctcatggcaacaatcttgcaaacaagctttgcaccggccaagctccaatagcctaactcatcttggatgcaattggttatttgataagttgttgtcttttttcctctgaagattctcacattctcttctttccatatctcctaggcaatgagcaaaaagactgatttgagcgctttgtgttttgttgtcttcaggttgctagtcccttgcgtctactaatccaacaggtctttgctagcactccacttctggatgatgtgcccttgccactccaccattatatcatggcaagtcacataagcactgatgaccagatttccagggccctgacccaattttcacataaattttttctttttttcctcgtatattccctcaaattttcacatgttttttttattccacctattcttcgtcatttttcccattcccccttatttttctttttttcttttcttttttccttttcattcatttttagcattttcttggccttatatttcaaattttttggaccaaacatgctaatgggcctatgctggcccatacaccacatttgggctcatggcctccttggattatgtttcggcctaggtctcaacacgtgggtcggcacgacacggtccgctacagaaaaccgcgctattacaaagtcagtgccatgctggtccaggctgcccgtttggacacctatagtcttatcttccctctcacaacgccgtcggagcaatatgccaaaatggacttggccctgtgccgtcgtcaagatgcagccatgccgatgcaggtctccatttcatgatttcatctccatcgatccacacgcgcggcgcagccagggatgtgctcactttgttcgtaagcaataaagatggggattaagtaaagccatgtaaaacgataaaattattagtaattgattatttgttgggatgtaattattagtacaaacttaaaagctgatttatttgatattttagaacaatttttatatgaaaacatttttataagaaacgtattgtttagcagctttcagcttgaaaaacgtgttaacgagagtgggagtagattctgtattttaattagaaacgaaaggatatccagctcctctgggttttgacgaaccgtaccatgaacaatccatggataatatatccagctgatcaacacaactacttttggtcaattcctccatctcactctcgctcctttttttttttcttgtcttggtctcttttttttttcccatctacataattgcatatgtacatatgctttgacaagatcatacgtacggtcggtcgatgacgtcgtggtcagacaaaatatgtcaccaaatgtgaccgtgacacagctgacaacatcattttatacaagagcagaaacaatgtactagtactacgcttctgatgaattgcgagaccaaatattttgtttgtttttgcatgatcatcacttgtcatgcgtacgtaccttcgatctattttagtgagtgttcaatgaaccatacatattagtattgtttttgttaattaagtatctcacctacttagatcctcttatatatgttctctcttgatctcctctgatgttacctataaatagctactactactatttctctttttgagagaccaaattagctagtagctacttcttgatgtttttttagatgtcttgtatgttaattgccttctaattaaacgtcaaactccaccatatacaaaatccttttacactttcactttgtggattagtagaaattagcacctatacatatatatactacatatgataagtgaacatggagcatgagtcaaaaagtgcaaaatctctgaccttatctaagccgcttttcttcagaaggacctttcattagccgaatcagctctggattattgatcgttagctgctttaacttcagcatcactgaaaaagaaagaaattaacaaagagagattaaaaccacagtatatgtgtggttggttcgtgacagcttccgggcttttgacgccatctaacagctgacaatttcaagaaccatataaagtctgcaccttcttcatatcatcgaagcaaatcaagactaatcgatctctgcatgcaatcatcgtacaatcaatcgattaattacttccacgatattgacgaaacaaacgtatttcttcagctagccatggaacaggtctttttaaaatattactcctaatcaatttgcagtatacatctaaaatagagtggaatgggtacaaaagcagctctagacctgatcttctgctacaatttgctgcagtgaagtcttttttttttcacatcgtacgtactagctaattaattacttaactagctagatcacctgaaacagtcacttgatcaatcttgttttagactttttagatgactttgtcagttgagctactgatgatttagaacacagtaagagtttggataattaaaacgaatacatgcacataaatataatattagcatcgatcttggacgttatcaacgcccctatggcgtatttagtatttactgctttagggatcatatttcaagaacatggaagggtgtttatttttgtattgacatatttattaattattttaatatttaaaaatagtgacaggatatataataacatcatcgtgacgtgattgctaatatgtagacccatggacaatgggtctcacatgtcagtagtgacgatgctgtggtgtacagtttacgcgaaaattctttttctttcaagtatgtagatattttatcgtgttatttacttatttttcctcgtctcttgaaagatctgtaaagccctttttttacaccttttgtgaaaaagcaatatgtctccttttgctaacaaaaattgctgtccgatcatggcttttaggatttcatgtctgctggttgggtggactacacaattttcagcaactacggcacataatatccacaacaccagcgtcgacgaatttcgaaacccaatcataatatcgcatgacggtcatatccacgaatatggtgtcaaaatcaagagatctttgttcatctagtttcaagaaaaaacatatctcttttacatggccctagacccattcagcgcgcattattgtttacttctccaatggggtccattaatcactccatttcacatgagtaagccatgaaaatgaaggcaaagaaaattttaaccaccatatatatatttagtcagattattctccctgcaagttatctcagctagattttccttcaacaacctatgttgttagctgtaatatttgccaaagacacgtaatcccttattgcaacaaccaagcagcatactggactcatgcactactaatcatgctctaatttcaaaaaaaaatactaatcatgctcttggaatataattaagcttaattaattgtttgtctttgctatgcggctgcttgctgtctccgacattgaccatgctatgatcaacttacacacgtgtgcgtgcgcgcacacatcactacatttttttcccggtcgattttccgactctcgcataattttttaaagatatttttgcgtgatatgttggacttctagacttaaaaaattttaaatatatagtggcgtaatacaacaaatgtattatattattcctagctatttgaaatcaagtcagcgttattaacttacatatatgaaacctgtgacacaaaatatctaagtcgcgattttggctataactagtaaggctgcttatatataggaaaatatcatgtgaaaataaaccaagtgttggaaactcgtaaaaatcatacataaaagttttataaattcataaaaaattactagagataggtgtagatatgaaatatattctcaccaaatatcaattccaaactcaacttcatttgagagaaacaaaagtaacaaattttaggtgaatagtctcatattactcaccctaaatttgtcctttttgttactcccaaataaaattaagtttgaacttgagatttggtgataatgtatatcatatctacacctaactatctccaataattttgtttcataaatttgcaaaagttttaggtaagattttcaagagttttcaatactactaattagctagttttcaccgaatatatactcgtttgtatgttccaaatcgtacaagttagtcaaaccgtactaaatatgtctgttcaaaatgttggactagattgtctaattaagtcatttttttcttaagtagtggtaaagtctagggatgacatgcatgaacgaccgtaccaattttccacgtgtacatactgcctccttgctatgcatatatgctgcagcaagacagcaaattaagctaaggttaattgccaaattaattatattggttatttggtctcctacttgaccaggatattagtaatgccaagatcgtacgtgcaagtaagcggatttttttactagtataattttctcacgtttgatcaattattagcctacgaccagatacttaggtacatctgactaattaattaacagtggcacgtacatatacgtaccatatatcacctggtgtttattgcttaatatatctctgtcttgacttgtaccataacttcgaaacacatgaaatataattaataattcgtctgtaaaggatcgatgtaccaggccagcattgcgtcccgatggaccccaaatcaaactgtaacaaccggtcaattatcgattttcgactggttatttcatttacatggcggtcagaacgtcagattatcccttactcccgagccccattgagacaaagtatttatagaataattttgtagaatataaattttataggatttttttctatctagataacactttaaaatataggattatacccaatttaatttgttgacaaaataagacggatggtcaaacattaaaaaaaaaaccataactgcatttaaaatgggatggatgaagtacatcctttacagatgaattattaattatatttatgattattgactttttaacagagttttctgacttaatttgagaaacatcaatccgtacttgcatacgtacatcagtacatgcatgtacgtatagcagcctagcgggattgacccgaaattgaggtgcttggtgagctcaagtagcatgcgtactggagtgttgactacgtgattatactattcatcaccagtgatttttttaattatatatttagtttagtatgaacgaaattaagttgtgtggtatatctatgatgcacaatactttgatgatatggaatgtttcagtttatattttaaaaagattcaagttcaaagataaatagtggaaactacatatctagagataggtggtagctagatagttaattgcatttcaataaaactccatcgaaccctgttagagcatggccaactgcaatccaaaactgtgttccattcaaatttcattttaatctctaaggattcaaacatatacttctctccgggagatatcctaaacttaactttctataataataataataataataataataataataataataataataataataataataataataataataataataataataataataataataataataataataataataataacgccagttatgttttcaaaattaaagttgtgtatatataatcacaattcgttcatccacatgcaattaaattgacggttaatttgaacatatattggactgcacagcgttaattaattcagtcgttcgatcgagttcgttgatcaatttgcagcacgcagtctgcgaatgcaaacacgtaagcaaacatggacatatttggtcagttgatcaatcgatcgaccatatatatatatcgttttcaatcaacgtgcacgtgctacgcagccctcgttgattaattatcactcctaataactgtataattttgggcgattattaacgttaatccctacctgataatcacacgtacacacattgatttgattgtcagttaattataattagtccgtagctagggcgacgtcttccaaccccaccaacagtaaacaccctgctagccacggtgattttatatattaattatttcacattttcactgcgtactgtaaagtatagtcaaaagtattttaaacttggactaataatatggctacaatttgtgctaaaaaatatatggttacaattaattggtgttccacatatggaagagtaattctattttaacatatataatagaaattatattgttactctagtttagcggtcttaactcaaaaattgtatttctttataaataaaagtacatcgtagacctgtacatataccagttttatttttcaaaacaggagaagcaattcagcaataatgttgtgtacttgacgcttgaaatgtttattagccgttgtaaaattaaataaaacttaaactgttgcgaggatatatataattttctataaaaaaatactattatgctcataataattactagtgcttagttccactaggttgtaaagttagtcagacaacatcttactacacaccatgcaagaagatgtactcccttcatttcaaaatattttgtttctttacacgacaaagctttggccaactattgctctactatactattattatgatataattaacatgaaatttaaggtactcactccttccactctaaaataagttcatctttggcattgggtattcaaaataaggtggaggaaaaaaaactaaaatgttgttcatattagcgaaagtagtattgacatgtgggtaggtaaggagtagataaaagttagcgaaggaacaaaacttattgatttatgatttgtgaatcaagagtaaggaaggagataataggggaacttattctaaaagaaagggtataggcatagagcctagaaataaaattattttaggactgaggagtagttataattattttttaataacacaaataatatcttgatagaatatatataatatttatcaattatcagcgccttttctaagaaaacaaaatacatcttctattttgggacggagggccatattgttattccctccatcaaaaaaatattaagcatatttttttagttttttaaataatatgatcatatttatattatctaagacttaaataaatatattatcttttcgttttgtaatgctagattaaatccttgaacagaccataccaactaatccatatgttccatattgatcatcatattaattttttcaccaaaattaaggaaaacttaaaaacttaacttccttgtattttatctaatgtgcgtatgtggtagagaaaattaaaaaaaagcttttaactccccatgcacaagaaatatgtgctttattgtactacccggaatgcttgcatatatgtactccctccagttttattttaattgacgtttttggacaatgacacggtctacaatatatatctttaaccttatttttctattataatatatacaataaataaatgcatgtttactttaattatagtgttttgaaagacaaatctatatacgttgttctagtttctttaaactaaatatttttaaagttatcgatggtcaaagttataaaagtttgacctcaaccttatccaaaacgtgaattattatagaaccggagggagtatagatgtagtaacattgcacatcaaacgaaggggccatggatcaaggttatatggtgatcaatttggaatttttgacttttcattgtatgatgattaatatgaaaacgataaaaatatcttaatactcgttggtggcatacatacattgctagtttttttttattgatctttgatgacaaaacaaatacgtatgacactttagcatcttgtttcataaaaaactaacctttttggtactagattgatttttttatgggctggaggggtacacttttggatagagggagggagtgagcaaacatgagccaacagttagcgatgttgttggtgtgcagggagcgagcaaacatgagccaacgcattgcgaaagccaataaaattggtcagtttcaaattcattaattgtcacccaagtttagctagcatatctagatcttgaccaaaatcagacttgtctacacagtcctacacctgtggctgtgccgcttcggtttcctgtctcccagtccaaccaccccattaatccacctaattaaccaaattaattactgataatcactgctagtattaccgcataaacctccactgttaagttacttaacctaatttcccctttaatccacacacgtaaccgcaagcgaccacgtcgatccatcgattggcttcgcgcgccatataaatttgcttcaattcaccggagaagccatcaaaccaaccaccattggcgccatgtcgagctcgagcttgacgacgaccagcagcatggactccgtcgtcgacggcggcctcgacacgcgcctctctctcgccgtcggctgctgcccgccgcggaggaggccggtgttgctgttcggtgaggtgctcccgtcgccggagaagaaggtggcggcggcggcggtggtggctgctgggaagcgaggccgagagcagaggggtgaggctgaggctgaagctacgacgacgaggcagcggcggagctgcaagaagggcaggagggggaggggagacgacgatgacgacgacggtgatcgccggagcccgagcggcggcggcggtgacgaggaaggcgcgagcaggaagaagctccggctcaccggcgagcaggccacgcttctcgaggacagcttccgcgcccacaacatcctctcccatgtaagtcacaaaattactccaaatccacgcgatccaaattcaatatattcatacatgcagattttatcttagcttttattataaaaaccttttcaagttcgtaataactaaaactcaattaatcttgcgctaatagttttctcattttgtatgtgtgctgactttatcttcattttaatctatttcaaacgccaccatagaacattagaacagacaaattattgcacatggtttcgtgaaaaggatgtttgtttcatccgaaattttgatcagaaatgtgattgaattttggaatcaaattcaaacaggcggagaagcaggagctggcggggaagctggggctgagcgcgaggcaggtggaggtgtggttccagaacaggagggcgaggacgaagctgaagcagacggaggccgactgcgacctgctccgccgctggtgcgaccacctcgccgccgacaacgcccgcctccgccgcgacctcgccgagctgcgccgctcctcctcctcgccgccggtgtccggcctcgccgtggccacgcccgtcgtctgcccctcctgcgcccacgacgacaagcgccgcctcgccttcgccaccgccgccgccgccgccggcgacatggccagtaactgatcgagctgggctcctgcttgccggccatcacaaacactgtttaattaattaattagacacgaacaattatttatattaaggttgattttgctagtactagtttagctagctagctagctagctaccacgggcttaataattcgtttggattattgggaaaattttatactctttatcaattaggaacatgattaattttgcatttttactgaccaatacatatgtttcgtgtgtgtgtgtgtctacatacatacatacatacatacatacatacatatatatatatatatatatatatatatatatatatatatatatatatatatatatgtatgtatgtatgtatgtatgtatgtatgtatgtatgtatgtatgtatgtatgtatgtatgtatgtatgtatgtatgtatgcatgtatatatacacacatacatatttggtacaatcagtaagttgatttttctgtcactcatgtgcttgattattgtttctatattttttttcatgcgaatctcatatttaattccatgaagagatgcatcttctctgaattcgtttagatcggattgaacagaaatggctaggtgaaagatcacaattttttttatcagtcgcaacagtttcatattcagagtctcaggtggtgtttggatcgagggacttaactttagtccatgtatttagacactaatttagagtattaaatatagactacttataaaactaattacataaatgaaagctaattcacgagacaaattttttaagcctaattaatctataattagagaatgtttactgtagcatcacataagctaatcatggattaaataggctcaatagattcgttttgtgaattagtccaagattatagatgggttttattaatagtctacgtttaatacttataattagtgtccaaatatctgatgtaataggaacttaaaagttttagtcacatctaaacaggtccgaagactcgttaggaaatagcacatgcggaggatttcttcaactcggtagcctttgcattcacttccatcagttaaaccaagcatgttataagccaaaatggagaaaaataattatatgttatctgttactacaaacattattaataatcaataaccactaattaaatgactaggagaggagggcaaatacactgcatacaagcatacaattcacaagcttagtatagatatgtttgggccattttggaggccatgtgtatggttgaacagaaagcccaaacaacaccagctaggccctatttgcacaaaaacagcagtaatgattatgaattcaaaaaccaaaacaaaagaaaatgtttcaaaaaccttcaggaggcaaaattcccaaacctccatgaatcaaacatccatcccctgctctccatgtgctactctgaaataacatttctcagctacccaaaaaaaatcatgcgttccaaatattgtttgtactgcataaaagatgaaatccttccaacttttcaagagagattggatggaacaagcaagtgaaacaagtgatggattggatgctctgtttttcatccaaccaactgatgaagaatccttcctcttgtggagtcagaacaaacaccctcgcagcgaaaaggcgatggagaatctgatcgaatcagacacagttcttgttattggccctgaccagaaaacaaaagcaagaaaccaaactacacggacagaatatccaaagctgaagtgatcatgatcatgcatgaatcatactggaggacataaaacagaaatctttttcaccagcaatatatacatatatatatgatatagtagcattgtggtagcttcagatgatcattcatggtgagcaaaacaagagaagaaagccgaggattgttactgataatcatactatgtgtcagctactgctaattagtacttcccccgctctaaaatataagcatttatgcgtgtttttcaaaatgaataggcggagaaatgttcggaaatattttaaaaaacacggagaaatgcttatattttgaaatgcgggtattacttactactgatgaagtgtcagtaattactgctaatataatatgcagcagtgatgcaagagattgatagagattaggaaatggtcgtcgtcgtctttgatgttcttctcctttcttggccgccatggctggcaatggcaatggcgtgagagctcgctttgatttggctgtacacgcgccgcgcgctcatcggttgtgaagagggttggagccggtggggacgaccctctcgtcggcggcggcggcggcgggcggcgaccacccgcggcccgcggcggcggggccggtggcgccgcctctactgctcctctgcttcttgcaccgggaggcggcggcggcggcggcgtcgaaggcggcggtggaggaggcgacgacgacgcggcctccaccggtgtgcgccatgccgccgccgccgataggcacgccgcgcgcggcggcggcggcgagcagcacgagcgccaggcacgccgccgggagggagtacttccaccgccgccgccacctcatggcacggccacgtcgccacatcgcgctcgcgccaatgccaagccggggcaagcaagcgcacgcgcgaacgacagacgccggcggcgccggcggcgagaggcgagccggcaacggcgtggctccgacgagcttgacgcgtagcgaagtagcgaagctgcagaaggagaggaaacgagagaagaagagaagagacaactttggcttgcaaaacccgtttatatggagtacctctttgtcacaatatttggcgcttaaaataatatactcgtccaaacttttaaaattttgactaattagagagtagtgcatgatttgatttatttttaaggtgggcgaataataaattatgtttgttacttgagtaaatttcacgaaactacatagttaaaacgtcgtattacaaaactacagatttaatacaagacttttcaaaaaaaactacagatttaaggccaagcataaaaaagatagatttgatactcgaattatcacaaaactacatatgttacggtgtaaatttctaccactactattttgtcagagttataaatgttgtagttttgtagttaacttggtgcaaaacatatagttttgtgatatttttattactaaaaatgtaattttatgatactccatcttaaatatgtagtttttcgataaatttggtcctaaatatgtagttttgtgatacatcgtcttaaatatttatttttatgttacatcgtgttaaaatctatagttttgtgatagcttgagtacatgtagttttgtgaattttactcttgttattttgtattagtgaaatgtctgtacgttagatatttgtttcgtgaaataatatagtaccacatgtgacaaactaacattaagtcatgacatctcttgaattagttttttagaaaaaaaaacattagccctcctttggaatagagaaattttgtaaacaaatttgaggaaatgaaggtgtgaaaatattcatgtgttcaaaatgaacccttatgccctgtttggctaatgggttaaggaaatgattttccacccaccaaagagtgtgtatttaaatcctagccatccattatccctctcttatttcatcctaacccttcacccattttcctacctcaattccactcctctccccattatccaaacacactgttaatattgactattttgttgataccaaatgtggagtgtatggaccatcctactaagaaaaagatgatgggaaatttaggcccaatatgtaattttctgaatattggaatccattacacttgaccaataaaagcattgattttgtgatcagagagctagaacaggaggtgcataaaagagggggtcaaagagggactcctaggattaacagtaggaaaagctgcaaggccagccccatccctttgatgcagcactgccaccaaaccacattgatgagccttcaatcacctatatgcctcagagaacactgagaagactagagagaaaaccacagcatatggggagagacctacttaaagcaaaggtgtagaccattgaggcccttgtgatggaatggaatggaatggaaatgtacatcatgggttgtgttgtgcacttgtgcctcacccttccagtgctcatccagtgctatatgtatccatgacatttgttacaatgtgcccattctcatttcatacaccaatttgctaggttcctctctttgggggccaatgtgtgtacttcttgtattatcctaattgtatgtgtagtttacactaaggtacttttctggaagattgtacttaagcccacccaaaaagagaaccatggaactagaagatctcatgctttgtcattgactcattgctcttcactttggtcgaaaaaaaatggtttcataccagcagaagatcgaaagtttgattgtgtatatgccaccgaactttttcggtactgtttgatgatcttggaaaaatgcgttaatgttttttctttacaataaaggaagctttattgatataaaacaattaaatcaagatgatacaataatcttagaaccacttttgacttatgcatatctagaatacatatagtctaaaatgtttctggtaaacataatggacacactaatgactatctatccgtagactaaatcagcacgtatatacctaggtaaaaaaaagtttcctaaccacctagtccaaatttgacagcccacataaactaaatcatgtgatcctgtgaataaccaagtagataattatttttcttcttgtaaaaaatcacaatatttctacttagccataaagactaacaatgtagcaatgcacaatgattgtcttaggtagtacatcaaacaaaaatgatccttttcttaattcttcaaaattcatgggtaataaaaacaaggaaaggagatggaaagtacacaactccatgtggctttccatgctcattatcctctatatcaaacaaatgacccttttcaattcttcaaaattcatggccaataaaaacaaggaaaggagatggtaaagtacacaactccatggcttttcatgctcactatccttacaggaggattagacatgtcccttttttccaccagaaggaaataattgatatgttctccagctttggtggtagtagggctttcggttctgtcacgttgccatcactgttgatgccatcaccttggtacgtgctgagttatatgcttcattcaatgcaaagcgtagcttgtacatgccggccgtactgtggcccatcaggtagagccaggcaggccacaggacaaagatttgttcaatgattccatcaatatcaacatcaatgtttacaattgtttttttaaaaaaaacaattggcttgatcagaccagaatgatctttgaagtgatgtctttctcaattgctttggtttttttttgacacgagtgttaatcttgatgcctattgcagtagtttagtactatctgtttacccatcgttttaccaagagctgactataacccataataatatttattagcaaacaaaaaaaattataggtaaaactttgatgtatgtttttaacgatttgaaggccagtgctaaacaataagctatggtgacaaaacattaaaatttaattttggatgcagctgataagctgtagaacgatgaagctggaattcaaatgtaggggctgtaaatggagcttgttattgtatagtttcgtctaatttgcttaatgatgacagattgttcaggaagagatttaggcagcgttcgagagggtgagggagtgagtttgtttgtttcgttttccgcgcgcacgtttcccaaactactaaacggtgtgttttttgtaaaaattttctataggaaatttgctttaaaaaaatcatattaatccattttttaaatttaaaatagttaatactcaattaatcatgagcaaatagctcacctcgttttgcgtatcctcctaatctcctcaatccccttctcctcaaatacacccttagtactcgttcttggccatttcatgttgcacacagctagtactacctccgtcccattataagtgcagccatgttttttcacgcccaattttgaccgtccgtcttatttgaaaattttttaaaaaaaaattaaaaacataagtcacgagtaaagtactatccatgttttatcatctcataacaataaaaatattaattataaaaatttttttaaataagacaacgaacaaagttggacgcgaaaacttatggttgtacttataatgggacagagggagtaagaggatgcatttcccccaaaaaaaaggaaacagcatttgaatatgaggttatcagattagtgacccacatgatcagatgttgccattcccatacctaaaagtttggtttcttaataactggctttgatgtcgactgtcaccggaagatttgtggaagttagtgaaattgctgctgcttctctctctctatctctctttaaggtgctcctgtgtgtaacttggttggttcgttgcatagccattgtcccggcgcgattaatagagaggctgacggatcagtgtgccggagacgcaaagcctggtaaattgtctccaggtactagtggctggcttgctgctactgcttcagttcttctcctctcttttttttcttcctgagacattgtagtaatggcactgttcatcttgatgttctgatagaacggttcgatgatcctccagtactctgcctgcagtgagagtgtgaggtgagtgatatgattcaggaacgacaaaggaagaaaagaaaaggatgcaatcagcagagcaaagctggtacaggatggatgcagccatgaaaggacatgtatgaagtaatatagtggtgaaaccctacttcatctattgcagtttatggctcttttgaatgcagaaatttcatctattggagtagtattttcataggagtcagttcaattttcaaaaaaattgtaactatattcttctgtaccgaatagctgaatagatgaaaaatgtgataattattcgaggatataagcgaatgaattaactattatagagttgaaaatagatttaaatcaatactttaagaaactcatgtataaaaagttcttataaaaatagcatcgtttagaaggtcagaaagcatatgcccctctatccattcatatatgcactgaaaaagaacacactagtcaggctattactcttataactatacaataacaacaccaggaaataagtctagacaaatatagatgattcttagaatgcttcaggccgaataaaaatattaagtgatttttagaatgcttcaggccgaataaaaacaagagacatacagtgttgctacatgaatgaaacctgtagccagggactgctatatactgtctctgtagcagtataaatagcacacgagtattatttgtagttgtactggcaatgccagagcagcatcagcatgagagtattgcgtgctgccatagacgcatgcaggagcaggagctgttcgatgagcagtgacactgtgacagttaagagtgagagtgcttcattcagttctcccaacagcaatgcaggccggacaccggacatgcaatacagtaacacactaacaccagagtatctcacctctaccaactgcctcactgttgttgtagcagcatcaactgtaatttcatagcaataacggttcagatttcagaaggcatggtaagattatacaacggaaacacattggttactgcttaaaatactccccctctcaaaattttgatagagatgctactcgttcaatattgcctccaggttacattttacaacataacatgtcaacacccttgagagatgtcaagcccctctccgtgtggtggttaatgctatctaacaacaatatattgcatacgaagcagcagcactaacaaccatgcaatgaggtagtatcaggagatctttcttcaagatggctacggaggagcttcagcttgtgcttataatgttgtatcttaggtgccataaaacaatagcaacatacgaatttctcctagaacaatcatatttctcctctgtagcctccaccgccatagtaatctcttctagagcccgcgatcgccatggacttctggtgctccagctttggacagtcggtaacacgatggccaagaccaccacagtatgcacatcccttaacaccgctctccttggccatggtttcctcatcttccaatgggtcattgagctcagccaacactggcggtattctttgcttagcttccttaagcaagtgcttaaggtcaagaagggtagtctccgtttgattcttgtttatgaaggttgttgctattccagttttcccacatcgaccagttcgaccaatccggtgaacatagttttctatttcagcaggcatatcatagttaatcacatgctggatatcagggaaatcaagacctttcgaggcaacatcagtagccaccaaaacatccttctttccattcttgaagaactcgattgcattctctctttcctcttgatcctttcctccatggattgcaacagcctctacacccttcagaagaagatactcatggatatagtcgacatcagctttgttttcacaaaagacaagaactggaggtggagtcttctggaggcattccaggagatatataattctggcatcctccttgacatactcaacttcttggatgacatccagatttgccgcaccagctctaccaacattcacaataacaggtttcacaagggcactcttcgcaaagttttgaatcttcttcggcatagtggcagaaaatagaagtgtctgcctttgtgccttgaaatggtcaaaaacctcacggatatcatcctcaaacccaagatcgacaagcctatcagcttcatccaaggtcaagtacctgtacaaatcataaaagggcgttaagcaaactgtaaagcacgtgttcctaacattaagatatcctctagtccaacacaatgtttttcgaacaaaacagaatctgaaacgataacaggcagtactgggacatattattatatgctaactcacctagattgctgatagacagttggaacctgcatcttaactaaatcaaacaggtaaggcatattggcattttggcgcagtagaactatgaaataaaatggcacatggatgcctgggtgggaatagcaagtctcccatgtttcatattccctctgtcccaaaatgtaagcatttctagaggctttcacggaaagaaattaagtagtaggattgaatggtggcaatactttgggacaaattttgtaatcaagaaatagctacagtttggggattgagggagtatacagctattgaagccaaaaatattaatatttagaacctatatatatcatcaaagaataaataatgatgactgacatgtgaggtcttacaaccaaaattcaaacatcatgacacaatactttggtgagatgtgacgaaatgtatacacttcaccatgtacatatattacatattcagggatagttgtttatttaattatttatcagtacagatggaaaaagaaacagttgtgttcagaagaaattttcaatatgcactgcagggacaatgatttgattaagtatcaaagtagcatgtatatcctcaagaattcactttgatttaaaatatcataattcagagctggttgtccactaagaggacttcaaaagtgcaggataataatatagtcttggagcttcggacaattaagagtgaaacaactctaggcccaacgaagagtaaaaaatctgaaggtcttgagtttttgtgtttctctctactattactctatttagtgtgtacagtgcaactctaacccttggcacagaacgagtcatgcgttttatacatgaaagttttcacttctaactcacaaaattttacacatctataaactattaaagtgtctgtgtctattatgttgaagctatgagaacaacccattgtacagggaaggcatacacattagctaaagcgtagtactagttccaccatttatgtggtaagaagaatatgaaactatgacataaatataatatatatattctgcttgtggtagaaagcaccaaattcattgaaaacatccagaactcacctgcaattgtcgaggttcatctttttcttggcaagtaaatccttgagtcggccaggtgtagccaccacaatatgtactcccttcttgaccacatccagctgcgccctcatatcgacacccccaatgcaaagcaacgggcgtatctccgggtacccagcctccttaagtggaacaaggaactgctcaatgacatcgtacgtttgcttggccagctctcgcgatggacagatgatcatcccaaatggcccttcacccggcacgattggcatcatcatctcctcctgtaatgccaccatgatgagcggcagcacaaacaccaacgtcttcccggaccctgtgaaggcaatgccaatcatgtcgcgcccggagagcaccacgggcaatccctgcacctggatgggagtgggctggacgatgcccttctcgcggagcttgcgcagcatgggctcgggcaggcggaggtcgcggaagtcccgagcgggcggcggcacgtcgtccccgtccacgaggatgtgccacttgcggcggagctcgtcggccttggcgcgcggcatgcggcggaggcggagcggcggcttccaccccgtcttgagcgggtcggagtaggtgatccccttggcgagctcgcgcaccgacatgagcgtcttgcggtcggagaggtgctcgatcatctccttctcctgcatgatgagctgctccgtgtgggtcacctccggcgcggcccgcttgagctgcgtcgccttgacgaggaggctgggcttcgcggaggcttcgaggccgccaccgccaccgccggctgagggctggttcggcggtgggggagggggaggcgggagatccgaggcggcctccgcggcggaggaggatgggggcgcgggcttggagaggcggaggcggcggaggcggtcggcctccatggcccggcgcttggcgacggggatgtactcctcgtagttgtcttcgtcatcggagttggcggcggcggcggtcgccggcgaggaggccgtggcggcggccatggcggggggattagggtttggagagggaggcggagatggggaattcgcgaggaggaagaatcgacttgatccgatcgggtttttttttttctttttctttttcgtttttttcttctgtcgagattgagagctgagacgcgtatcgatttaccgacatgagatcgtgatggagattgggccgtaagagctggatcctggcccataactacatgtgcctcaatctcaacccaggctgaatatacagcccaataacccatcttgtgttgtactccatccataaaaaaacaagggaccacctatacatttgtcgacaaattttctactaaaaatttgacagatgtaattatagtacaatcgtagtgtaattacaatgtaacttgtatgtaattacactgtaacttgcatgtaactacagtgtaacttgtatgtaagtttcacgtaattttgaatcgttggatctattacaagatttgttctatggaggaagaaaaaaatcacatcacacacatatatgaaagaatttattcccacgacctctattttactgaaataacatgttaccgagagattcttgaaagttacatacaagttacattatagttacagtgtaattacatgcaagttacagtgtaattacactacgattgtactgtaattacatctgacaaatattagggggagaaatttgatgacaaatatctagcaaaatcgaaaaacaatatatcatccaatattatattgatttttttttgacgagggagtaagtaattgtctcctttgtttaatgataatgtcttcaatgtgtgactttgactttcatttgtaaggtaaaataattactttctccttttgcatttatttggcattattggctttttcattgttttccctttgaccactaagcatttaaaaaagattaatatgtgatgaatgaaatactatttctatgtttaggatgaaacacactttggtgatataatatattttctataaatattttgtaaaataagacgattggtaagaattttgttgtgatcgtctaatatgtggttgttttgtctatgcaaaagggtcatacataagcatgtaaggttaatattgacatataagaactggataaggtaacatggattgaagggttccaagtgatatacagaagtgtgttcgacttttatcggtgtgcagtaactaaatgaggaacacaggtggctttttgtatttgggccctgtttagttccaaagttttttttttccaaacttctaactttccatcacatcaaaccttttatacacacaacttttctatcacatcgtaccaatttcaacgaaacttccaaacttcagtgtgaactaaacacagccttggtttgagccaggggcggatctacgacctggtgaccctagacgtccaggctcgtcaacgaataatctattattaaaagtccatcctattaaaagattaaataaaatctctatagtaaatactgctatctatagtaaagtgtatttggactttaaaatatttatagcttcgttactgatttgagtaacacaaatagttcattatgtttggtttacgagataggatgtgacaaaacataattgtgtaggatttttttcacgttgaacaactgaatgagaaacacgaataactgaatgaagaacacggaagattaaggtgtcgttgtacgtaacacccctaaacttatgatctctagtaccctagacttataatctctactgggaaggagaggtaattaatcatatctgggaaggagaggtaatcatatgctttgctcagttgtagcttagctgtatacatccgattggatgtagaggctaggtttatcatattttctaaaataaatatgcttagttgtagcaatctcagttcaagcatttttactttgctataataacagatcaaattatataacaacatggttttgtaaaattaaaacgtgctgttttgcgaaatttactaagtttataatcgttgcattcggtaaaagatgtttatacgacatccggaatgcaatatgtgctaatgtgcaagcatttgtgtgtttgattcgtgtaactgtttctgaattactcatatttcaccatctcattattcgcgtgataattgatcattagaatttgagaattggaacatatataaaggacacaaacatatatatatatatatatatatatatatatatatatatatatatatatacgaggaagcgatgcgatatcagtgcagaaatttttctgaaacaaaatgagtacatcatcctcctctatcatctccctccttaattaaatcatcacagaataatcatatatttactccgtgatgcagtagtatagtgtgtgacgaaaagtcggagcagtaaataaataaatccaaaaggcgaatttacgaagcaagcaagcattagtggttattaatctccttcaattaaggcctcctcctccttaatcaacggcgagggtggtagtgctgcggcttggcggcggcgccgtcgccggcgggcttggcgtccatgacggtctcgaaggcgccgacgagcgccttcaccctgctgcactgccgcttctccaggagcttgctccgcgcctcctcgatcacgtcgttgctccgccgcgccatctcccgccggcgaggctgctcctcctccgacctcttctccatcgccgtcttcaccctgctccccttgaacctccgcaccagctcgtcgccgtcggcgtcgtcgtcacgctgcttcttgatcgcctccttcaccaccgccacgaacttgtcatcctccttcaccaccgcgaagaacttgtcctcctccttcaccaccacgacgaacttgtcctcctccgtcgaggaggcggcggcaggcgagtcggtgggcactggagtagcagcggcgtcgcctttcttgggctcgtcgtcgtcgaccacctcctcctcttcgatgatggtggtggcggtggtcgcgatctccttctccggctccggcgacttgatcgtgttcggctcttcttcctccaccgccgcgacggcgatcaccaccggcgtgttcgcctcgtgtatgatcttctccgggacgacctcctgctgatcttgccttgcgccgccgccatggacgtcgtcgtcggtggtagtgatcgcatccaaggaaggcacgctcgccgacgactcggagcccttgccgttgaccgaggccgagatgtcgccgccgccgccgccgacgccgacgatgacgtcgtccttgctcttcctccggcgagacgacttgctgcggcggaacgcgcgggacgcgcgctgcatgagcttcctcggcgacagcatcgacgagtagtaggacagcggcttggccgtcgccgccttgtccttgtgggtggcggccggcggcggcgagtcgtcgtcggtcctgatcgtcatgcagctgatggacagcgacctgaggtggtggcgcgacggcgccggggtggcgggcgtcgacgccgaggcccgcggcggctgctggtggtggcggcgcgaggcgttggagctggacggcggcgaggtgggcgccttgccgctcgcgctccgcggcagccgcgacggcgacggcgacgtcgacgaggaggccatgggctgcttcggcgacgacattgtgattgtgttagggcaaacgagaaaaacatatatattacgattaaatatgaacttagatctatctttctaaagctggctcatctcatgcggtgttaaattttaagatgaatctaatgaaattatacataagaaaaaaaatagcaaaaaggaaagaaaagacacaaatccaatttgcatggacttcccaattatctataatattcataagaaataaataccaagaagtaaacaaaagagacatatcatcttaattcacatataccgtatttgcttttaacggttccactattaatcgtgacatatgcaaacatatactccgtattgtgttgatcaccaagattaccaagattgatagtcgttaaattcagtatttaccctgattttttttagatgatgaaccgatcacagtaacaaaagagaaagtgatttatggattaaaaaggccaaataaaaaggcttcttgtttgtttaggttagacgttttagcttataagcccaacaaagagaggccataatccaaacttcaattaataaagaaaactcacaacaagattctacatctacatatatattctttttcttaaaaaaagatgcatacaataatccttttattcagctccggtgtataatgacataatgaaatccctacatggtaggtggctcataccgtgataaatcttgacgtgcacatattagcattgctcacaccataacacacttgaacaacatcgtacgtatagcatctctctatttttttttcaataacattaattgtttagcaagcatctaatgtgaatctcattttttttttcaaaactagaagaaagagtgaatctctaacagaagcgcaatacaattatctatttttctttttccaaaaccaatacattattatcacattttgttttcaatattcttgcatttcaaacaagcctccaaagacaatagccaccaataacaataacgagttaccttgagctgagtggtcaccttcatttcttcagatatgaagatgcgatgatggatttgcacacactacacaaatgctatgaaaaatgaaggaggccgagagccattcaaaggccctcagatggcctaaaactacacgatgatgagtttgtgggagagatgatggtagaggaggaggctatcgagaaggtaacaaataggcgaattttaagatctataataatagagagaaagacggagaagcaaacaattaattagagtcctacaaaattacatgtgttaaagaaaaccatgctaatatttgtatggtcgacaatttttcagtgtgatggttacatgttagaagctattttgacttggcatatatagttagatccattgacagccaccgcttaaatccagcagaaccaataaaacaacatttgtgtgcatgtataccaatctacaatgggtttccatattatgcatctagcttaaattaagccctaaaatgacattactggatggccacatcgaaataacactaaagtcaaaaccacagtgtagattaaaaaaataaataaccaaatcaatccagcactgattaataaaaagctacccagccttgcaactgaagtaatgaatcgaatcaaatatatatatatatatatatatatatatatatatatatatatatatatatatatatatatcttcttccaaaaatgaataaaccaatcatgaacagtcataccatctattgctttttttttaagaaccattgggaagaatggatcgtcaaatcaagagaaattgatttattatcaggtagccattcttttctttttatcatcttttactatccctccttggaggtaaagcatctccatctagattctagaagcaaaggccatcgactaatcactgccgtcgaaacacaagtgaacggttcgatgcgataacggaaaggcacgcgaatacaagtggccaagtggacggttcgatgcgataacagaaaggcacgcgtattcgtagcaagaaaaaaaaaagtactccccatctcaaaatataatattttcagaatagtatcaaggcaaatcattttaacttacattattaatagtaaaaaataaaaagaagtaatcatgtaaaattgatgatactagatttattattaaataaactactccctccgtcccataatataagagattttgattttttcttccatatttgaccactcgtcttattgaaattttttttgtatttgttatttattttatttgtgacttactttattacccaaagtacaacttttcgttttttatatttgcacaaattttttgaataagatgagtggttaaacagtgtaagcatcgaaagttcacgtttttggttttatagcaccgaaagttaccggttcactttaatagcacccaaagttcaccatgttcccatttttaacacttccgtcaattctcgatcgttttccgtccgtcttgatccagccacacacacgatatgacgtttctacccctcacaagcacaagtataatgcatgtcaatgaggggtagaaatgtcacatcatgtgtgtggctggatctataacgatcaagacggacggaaaaattgacggaagtgctaaaaatgggaacatggtgaactttgtatgctattaaagtgaaccggtaactttcggtgctataaaaccaaaaacgtgaactttcgatgctatatagcaaattttgccaaagttaaaatcccatagggagtatcataatatgcaaaacttttattgaaaatatattacttttatagatatttatagatattattggataaagtagcataacactaagacggtgttgaaataggaaaatgattatattttaagtccgagggagtattaaaatataaaaaaggggaggcgaggaacgcgagaagagaaagcagtagagtggtaggcgagtcgctgggcagcgagggagacagcgcggcggcgaggagatccaagcggcggcgggcggagatggcggcggaggggaagacgagggtggtggtggtcggcggcggcatcgccggatcgctccttgccaagaccatgcagccccacgccgacgtcgtcctcctcgatccgtaagcctagcctcgcctcgcctcgcctccgcaagttcccctcaggctcgccccgtgcttgtggaaatgcctgctcctagtgtatcgttgggatctagcttgttctagcgattgttttttttttatggaagacatgtcactggattggatgctgccgtactgggctgacaagtgcatttagctgctactatgattttaggtgtaggaaaatgcgcgctgattttaggttgggaagccatgtttctgcgttttcctagcatttgtctggccccaggtaatcgaggatgtttctgaagcatcataattcatagagccgtagaggatgaatacgaatttcatcaatttaagttttgaaaaatgcggggaacagcctgaaagggttgcatgttctgttcaaactaagagaaattttacggtccttaagaaagtaccttaagctactaagattttacactaaaaattttggtacctcgagatacctagtacctggagataacaaattttacactagaaaatatggtacctcccggtacctttttaaggatggtaaaattactctcaaactaattgcataacgaactctacatgactgttttccatttaacttcaatcaacaacatacgggatgggtgtaattgtttcctcgatttcgctggcatgtactttgcggtccagtgagttaatgccataagatgagtttccacttactttttgttgattgtgatttttttttgtgctcgcccaagttgctcatccttctgtacaataagttatagcatctcaaatgatgcacaagtaggcttgttcatatagaatgcagatcagttttgctgaaagtttaatggttatgtcctctgcgaatctatgcagacaataaacaagcttcatacccttacacttaagtatcatcaatcatgtcataatcggctatatcttctgatgacaggaaggactatttagagatcccttgggctgaattgagatcaatggttgaaccctcttttgctgagagatcattaatctatcacagagattatctcaccaatgcaactattgtaacctcttctgcagtcaatatcacagaacaagccgtgctgaccgctgatggtcaatctcttgcgtatgattatctagttatagcaactggccacgcattaacttctcctgggagcagaagcgagaggataaaagaattccaaagaggtaactggagttcaagcacatagtgaaaagttgatttctgaccttatcttcctacttatgctttgtaatcttgttgtagataaagggaagattgaatcctccgaatcagttctgataattggaggcggcccaactggtgttgagctagctggagagattgcagtagattacccagagaagaaggtgacccttgtccatagaggatcacggttactagaatttattggagacaaagcttccaaaaagtgtcttgattggctcacttcaaagaaagtagatgtgcttttccagcagtcgattgacttggattcattatcgaacacagagaagttgtacagaacatcagctggagaaacagtaacagctgattgccactttgtgtgtatcggtaagccactcagttcatcatggctacatgataccattctaaaggaatccttggacaacaagggaagactaatggtggaaaaggatttaagaataaaaggttataataacatttttgcaattggtgacatcacagatattcctgtaagtctactttaaacttgcacattctgttattcgatctacttgcagatgttccattattccctctgtttgagaatgttctgtacaactgagagttcttattttggctactactgagggaggatgaattgattttcttttcccaccatttggcacatatcattgactaaatcaagatacagctcaaacttgaacataatcaaatattctgcttgtccttgtagactgatacattgattacatgaatgcacatctggtgtgttgtgatgagtatacactgctttttattcatatctaaaagcctatatctttttttacttaagaaaacatttcctcccatagtatcccctaatggaactttctgtgattcgtatatcactttctgggtattgaaacactttgaaatacgaatctgaagtttgacttttgcatgtccaaaagaactgtacattaacagtaacacccgttaatttttcaggaaattaagcaaggttaccttgcccataagcatgctctgctagtagcaaagaacttgagattattgattaaaggttctcctaacagcaaactggagacttacagccctggatttgcattggcacttatctctcttggaaggaacgaagggttggctcagttgccgttcctcacactcggtggctgcttaccaggcaagattaaatctcgagatctgtttattggtaggacaaggaagcagatgggtctaaatgcttgaagtctttcttttcaaacaaatatgcttcgcccatattgtgctgtatctgcacaagtaaagaatgatggtgtgaaattgtgaatagcaatggactatgtgcatttactttgtatgctgagatcttttgccattgtaatgggtgtgacaatcaattcatggatttgtttgttggttggcaactgaatgctacatttgcttgtctgtaatgatattattattgtcggcgacgaatatttgataccaaaagggctcctgtatgaaaaagagaagatacttgtatgcacggattttggaacctccaccggtaagcacataacttgtccgaattttttatttttttcaattctttgtgaagttggtcaaaattattcaaaggttcaaatgatttcggccaaaaacaagcatcgaaattcccgaaaactagtgtgatttttcctaacataaaaaatatgtgtcagagtgctgctgtatagcatttccgttaggaataagttcaccggaggtcccttaacttaacagcgagattttttttagtccctcaaccacaataccaaaaatgttcgcccctaaattcattcaaaccgttcaccggaggtcccttagcagtataggtgggtggtttcgctgacgtggtatcctagtcagaaaaaaaaatcgtgaggcccacatgtcagttgcactttttttttcttttcttttcttcttctcttctcttttctctcttctctttctcttcttcttcttcagtgtgagtgaggccggtggagtggcgatgcgcgggcggcgggtccgcgcgacagccgagcggtggcgggaggcggcaggcgagcgcgaccggcgggcgagcacggaggaaggaagtggaggaggaggaagagtggcatggggaggaggaatgtgtagcggccgagcgcggcggcgggcgagcggacgagcacgacaggcggaggagggggccgcaacggcggaggtggccgaagaaggagcgtggcggcggtgggcgagctccgccggcctactccgccagccgcgtcgtcgtcggcggcgagagccgcccccaccggagcccctggagagcttaggggcgacggcggatgagcacgacggcgcgccgccgaccgaagcagtcgccgccaccgcgtctccagctgcagacgccatggaggccgaagagggcggcatggccatcgtgtacgacgcgcggctgcctcggctgcggtggaggaggtggaggacgccaccgcgacctattccgtgttccgcaacgagatcacggcggctagggacgcgctcgtcgatacccgccgccgcgctggcccgccgcccgcccatcgttgctccgtcagcgcggccgccctcgcctgccgccgcccgccgccgcttgtctgccgcgcggactcgccgccgcgctggcccgccgcccgcccatcgttgctccgtccgcgcggacgccctcgcctgccgccgcccgtcgctgcttgtctgccgcgcggacccgccgccgcgctcgcccgccgcccgcccatcgttgctccgtccgcgcggacgccctcgcctgccgccgcctgtcgctgcttgtctgccgcgcggacccgccgccgcgctcgcccgtcgcccgcccatctttgctccgtccgcgcggccgccctcgcctgccgccgcccgccgcgcggaccctccgcccgcgctcgcctgccgccacccgccgctgctcgctcgcccgccgcccgcccatcgcctttccgcccgccggcctcactcgaagaagaaaagaaagagaagagagaaaagaggaggaggagaagaaaagaaaagaaaaaaaaagatgtgccactgacatgtgagccccacgtactatattaatttttttttctgactaggatgccatgtcagcgaaaccacccacatatattgccaatggacctctggtgaacggtttgaataagtttagggacgaacatttctgatattatggttgagggacctcaaaaaaatctcgctgttaagttgagggacctccggtgaacttattccggcaaagtacaccgaaggtccctcaacttgtcatccggataaaaaacgtcctcgaaccacaaaaccagatatatagagtcccttaactatacaaaaccagtcacccgagatccttcggtagttttgacccggttttggtctacgtggcggctgagtcagcgtggaacccacgtgggccccacttgtcaggatgccacgtaagccggcctctccccctcctctttctcagttcctcctctctatctgcctgatgagcgcgagcggcgaggcttccaggcgagcagatggctgaggactcggcaagcagatggccgaggaccacgacgcggaaggggtccggatgacaggcgagggcgcggccgacggctgcgacgcccacagcctcgccggcggagaggaggagatcggcgaccagcgccgccgccgccgcgcttcctccacgcaccggccaccaccgcctccaaggggacctcgccgtgggcggcggccatcgtcgacctcgccgcccctagggccctccacgccggcgcacgaagggctcgccgcggaggacgagcggcgtggagctccagacgcgccgccagcgggaggcgagcgcggcggtgcgagtcgcgtccttgacggggaggcgggcgacgcggaggtcgtcggggagagtgctaacgctgtcctcgccgtcatagccctcggcggcggaaagcgtggcgccgttgccggaggcgggatggccgaggaaccaccggaggcggcctctgacttggaggcggccttggacgtcgcgaggacagcggcgagcccctcgtgcgccagcgtgcagggccctaggggcgccgaggtcgacgatggccgccgcccaggggcgtcctcccggcgtccaggacggaggtcgccatgaaggtcgtgtcgctgtcgcacgacgcggagcaggggatgaggcagttcgtcaccgaggtcgtcagcgtcggccgcttccgccaccgcaacgtcgtgccgctgctcggctactgccgccggagaggcgagctcctgcttgtctacgactacatgccgaacggcggcctggaccagtggttgcacggccagggtgcgccgctgctgggctaggcgcagcacgttcgcgccatcagaggcgtcgccgccggcctgctctgcctccacaagggctgggagcaggtggtcgtacaccgcgacgtcaaggcaagcaacgtgacaacgtgctcctcgacggcgagatggacgcgcggcttggcgacttcgggctggcgaggctgtacggccgcgccgccgcccatggcgcggtggctgctggcgcgtggaggaagcgcggcggagcccgagccgtcaggctcgcggtcgcggaggatggccggcgcgccggtcgacgggctcaagcaccggtcgacgtcgacgagccggcgaccgcgagggtgctgcacgaggaggaagagaaggaggcgccagcgtggcctccctccgcctcctctcggcctcctccgcctcctctcggctgcgagccgccgtctcagccgctccacgctgctactaggctactagctgggcagctggcttcttccaccccgccgcggcagcgccggagccccggcgaggtccgaccccgtcgacgcggaagcgaacccaaggatgccgccggtgggcgcccgacgcggccggtgtccggcgtggcccgccccgttccgccgccttggcagcgcgcgcgcgcgcccttccgagggcggccgtatgcccacaaggtattcgatggattgaccgacctgttctgttcatgcagtagcgggaaacgattcgttcaccatctagtttggcgtggaaggtattctacggatctttctttgacatgcgtttttttgtttgtttgctcaatgacatccaatcaggtgttcaggctagctgcaaccgtgcgtgattttactttggcttcacttttttatccatggattttatattccagttagtaatccgagttcctctcttaatttagttcatctaagaagacgttgtcctgtccttcgggcaaccatatacctgcaacgatgtctcggaatagcttctagtccactccaggtatctgtgcaaaagcttcaggatatatgtatacaaatgcacgcacaacatgtcggctataagtctatctgcaaattcgatctctttctggacaacacaacaacaacaacaccacaccagtacatcacaaagaaaatccctgtgcccacgaaagagagcaattaaggcatgagtgggggagcggagatgatcgcaggcgctgtcgtgcagcgtgttgccggcatgctgggtgataacgcctgggagaggatccagctgctgtggaacttccaagaggatgtccaagatatgaagagcaagatgactgacctcaaggttgcacttagctatgcagacaagcactctagagagactgacgacgacgcattggtgctacgacattggctcaacaagtacaagtctgttgcctacgacatggaagacacgttggatgagttgttgactaatgcgatgatatgggaaaataacccatgcacggtgcgttcccttcacatgcttgaggttaattaattatctgattgggaaaagcatatatactcttagctgttaaaacttatacataggagaatgtatttaattgtattattgtaagaagcacacactcttcatttgttgtcaatactaagactgtgatttgtgaaccattaatgagctggtccagctatagtttcctacatggctgcattgtgaacaggcaccaccaaacatttgatatttcatatttgtgaacatataccaccacgttttggttgtcaccgttggtatacacaacatggccaggcattctcactgttataagttaattttccaaaaatagaaaaagtatttatgtcctaggtatgagtctacttcataaaaaatataatcacccattctttctgaataagagatacagttgtggttatttgactaaattagaaaatgctacaggttaaattgttcttctcatcaatcaacccactcattgtgcgcatcaccatgtcaagtaagatgagaaatattcggatgaagttagataagattgctgaggaccagaagaaattcccctctatgcaattggctaacccaactggacaagacagtaccgataagtggagagaaacctttattggtcacacagacgaaattgagatggtagggagggcaagagagaagaaagagatattaatcaaggtgttgcagaacgatggaggccaagaaatctctatcattcctgttgttggccttggtggtatgggtaagactacattggccaaagctgtttacactgacaaggagacacatatgtttgatgtgaaagcatgggtccatgtctcaatggaatttcagctaaataagattgtgtctggcattatatctcatgtagagggcagcactccagctaatattgctgatctacaatatttaaaatctcagctggatcgcatactctgcaacaagttatatctcataatcctagatgacttatgggaggaagggtggtctaagttggagaagctgatggaaatgttgcaatctggaaagaaaggaagcaagataatagtgaccacccgtagtgaaaaggttgtaaatacattatctaccattcgtttatcatattttcataccgttgatccaattaaactggtgggtatgtcaattgatgaatgttggtttatcatgaagcctcgcaatatggaaaattgtgaattctctgaccttgtagacattggaaaagaaattgcacaacgatgcagtggagtacctctagttgctaaggctcttggttatgtgatgcagaagcaccgcacaagagaagaatggatggaaattaaaaatagtaacattctggataccaaggatgatgaggaaggaattctgaagggtttgctgctaagctattaccacatgcctccacaacttaaactttgtttcatgtactgctctatgtttcctatgagccacgttatagatcatgattgcttgatccagcaatggattgctttaggatttattcaagatactgatgggcaaccacttcagaaggttgctatggaatatgttaatgaattattggggatgtccttccttacaatcttcacttctcctacagtatgtaaaaatgatgcctacctcattgaattatgcaattgaaattatttgtcttgaagatctgaattatgctctccttttttattgccaaggtgctggcttcaaggatgttattcaagcccacactcaaacttcatatgcatgatatggtacatgagcttgcaagacatgttgctggtaatgaattctctcacacaaatggtgcagaaaacagaaatactaaaagggacaatttgaatttccactatcatttattgttaaatcaaaacgagacatcatcagcctataagtctttggcaacaaaggtcagggccctgcattttaggggatgcgataaaatgcatcttcctaagcaagcattttcacatacattatgtttgagagttttggatttgggtggacgccaagtgtcagagctaccaagttctgtttataaactaaagctattaagatatcttgatgcttctagccttcgtatctcaagcttttctaaatccttcaaccatctattgaacttgcaagccttgatactttcaaatacttacctaaagacattgcccacaaacattggttgcctccaaaagctgcaatactttgacctatcagggtgtgccaaccttaatgagcttcccacctcttttggggaccttagtagtcttctcttcctaaacttagcaagttgccatgaattggaggcgcttccaatgtccttcggcaatctgaatagacttcagtttctgagcctatcagattgctacaaactcaactcactgccagaatcttgttgtcaacttcatgatctggcacatcttgatctgtcggattgctataaccttggaaagctcccagactgcattgatcaactctctaagcttgagtatttgaacatgacaagttgttccaaggttcaagcgttgcccgagtctctatgcaagctcacgatgttaaggcatctaaatttgtcatattgtctaaggctagaaaatctgccctcatgtattggtgatttacagcttcaaagtttagacattcaaggctcctttctccttagagacctgccgaatagcatttttaacatgtccacacttaaaactgttgatggaacattcacatatttagtatcttctaaagtagaaaaactgagggagaatctgaaattggaaggctgttgtaagctggatggaggaagcactgacctatgcagtcggattacggaactaaaaaagacacactgccatgaattagagatacaaggtcttgaggattttaagcatttggaagggatagagcatgctatacttctcaacagcttgaagcttacaaagttgattttttcatggcaaccgaagcagtatacaaatgaaacggctcatcacaaaacggtgcttgggatgctcgtgcctcctagaagtgtccatcaccttgctatcaaaggttattgtggcatcgagttacctaagtggatgttggatattcgttcctacctacctcatcttaccaccatctttctgcacggtctgatggaatgcaaccgcctccctccacttgggtgcctaccacacctgagagcattgttaatgaccaaaatgcctaaaatcaagagtgttggtccagaattttatggagactacggaagctgccagaagctaagaatgattatcttggcttcaatggacaatttggaagagtggtggacaactagatcatctaaacaagataacgaattatcattaatccctgatttacagatgttgtgggcttccgattgtccaaagttgaaattcctgccttatccaccaaggagcttgacatggttcatagagaatagcaatcacgtgttgccagaacatgggtttgggaaccttacatctgctacttatccacttcatctttccatcgagcgtgcacccaattctcgcgaaatgtggcgtagggctcagcacctttcttcaatcgagtctcttactctcatgtctatagctggccttagagccctgccagaggctattcagtgcttcacgtccctctggagactcagtatattgggatgtggtgagttggagacgctgccggaatggctaggagattatttcacttgtctggaagagatttcgatcgacacttgcccaatgctgtcttcactgccggaaagcatacgacgcctcactaagctgaagaagttacggatcaccaactgccctgtattgtcagagaagtgccaaggagaggacaggcacaagattgctcatattctagagcccatattcctgtaaaagaagctcccacctagatcagcaggcatacaggccgagatgtagcatgcatggtgagatgagacatatatatccctcttgattgctagtagtagtaaaatgcgtgccagttttcctcaacttttgtgactcttgtctgcatattgcaggttggctgatactgttagcagggtaagtttacaaaacttttaaggtaatatgaaaaactatttgatctttcaccagcggatctatatttgaactagagggctgggacctcatacgtgcaggcaattggaccgtaaagcgaaagcggctgcttatgtacatatattcctcgactacatatgctgcttgtgccactaccagacttcatacttcagagctatcctgagggtggttatttttccgtgatttgttggtcactttttggctattgaaatacttgggctggtataagcatcataaatttcgcttttgcatccaaagaagttgtgcattaacagtagcacccgttaattttcaggaaattaagtgaggttaccttgcccaggctctgctagtagcaaagaatcttgagacttattgattaaaggttcttgtaacagcaaactggagatctaaaccactggatttccgttggcacttgtctctcttgaagaaacgaaagggttggctcagttgtcgttcatcactctcagtggctgcttaccaggctggattaaatctcgatatctgtttgtcagtaagacaagttagcagatgggtaagcatgatgcccatttcctttttattttcacgcagatatgcttcttgagttgttgctgtgttgtgttcttagtatgttgtatctgcacaagtatatgatgatggtgtgaatagtaatgaacaaagtgcatataccttgtaaacagagattttctggcccattgtaatggttgtgataatcatttatgcatttgttcgttggcaactgaacagtacatctgcttgtgtgtaatcacatcattaatgtcagcaatgaatatctgatacccaagaggcacctgtatgaaaaaagaatatacatatcttgtcgactgcaatgttgcaaacacatccatgaaaagatgctctgagtgatcctgaactggatgtaacataacggtgctttctcagaaagaaaatgagagagaggaagatcctgagcctggcaagaacagctatgcaactgtgcaagtacaagccttgaaatcttgaaaggtacatcctgtcgatttcactcctttttgccctgtattcatgagccgtgaagaggagacatctcattgcaatcctgaattttgggagtgtgtgtggcagatgctcaatttgtttggtctttgtcctatgaggtttaggttaggttcctggctcttcaactttgacctgtctgtatgagggcaggtcagctggaatttcttggaatttttgcaagttgtgtacttcacttgtactaccgaatcagccaaattttaagcagtatttgttactaccattcacaagttttattatagagatgacatgatggttagttgatgacccaattaaagtgaccattcattcatgtcttttttttttaaagtgatcatccatgtctcttttggggaagaaacaaagttctctctgttgatggattatgttattagacttgacatgaacctggcttatcttatctgcttaggatgattggatgcacattgcacacacaaaaactgagaaatatatatacaaatataatacaaactggccatatcccaaccaaattcgcaattcaagttcagctaaatcttgaggtggagaaactaatcaccaatttggtttctcatcttcttgtgatatcaacctctatgatgaacctggcctaactccagaccatggtgcagccaaaaggctcaaaagaacaaggccccacagaaccagacacaatgtggtgctgtctgatttgtgaagtcagtagataggttgcaaccagtgaaacacctaaacctaccctgtaaatagtgtaatcaaactccagaaccctctctatgtagcagttttgtataggccagaagaaatcatatcatcttatcctaaatcttccaataaccaaaatatatatcacatcaggtcgatgccatcatcctaaccactcctgcaaagtagccatcacaaaccatttacattagtttcttcttcacacagtatacatggattctcttttcagaaaaagtaaagtgcaccttagttagaagcctgaagttggacatgcattttcattcacatattttatatttgcatggtttttaatatctcaagtggatgtacatgtatatgtatttatgatttgcaaatccattggttttgacctttcagaaaaaaaaataatctgatggataaacctgcaaaatagcaaagctgttgcttgctagactcaccacagacaggatccctctgaatctgaattcaggagatcttgcattagttgtaacccaacttcttatatacatgtgtctcaactatatgagtagttgcaaccatataaaatccctgcattaagctttgcaaagctgtgagataatgcttaatgctaatgcctctagttagtgctatctgagtggagtgattagtgattagttggtctaaagaaaaagattgatatcaccaattgtgcattgacactcatgaacaaaacaatcagctttttgtgactttgtccccatgctatgattggtaccatacaagtatacatggatattttatattgtagccatattttaccatgcatgttggcacacctgacctgaaatggaacagtgctctcttgtctcccaactgtttgcctgtgacatttccttggctccatcgcaggaaaaaaacaattttttaacacagtacgaaaatatatactcatataaagtgcgcacgcattccaatgaatacacatacaccctattcatatacccatatgaacatcttcgaaagattatgtcagtatatcttgatattaacgaagtcattcatataagtacatgggaaagacttagtcaacatgattgacgagtcaccaaacacctcactttcgatgaacacattatctaatactgaaaaaataattaactttaaatacgaacactcataccgagttgtagattccaacctagataaatgagtaggtttcacaactaacgtaatcaaactaagctgctcaattgtattcatagagattattatctaagtttatatgtacatactgtctatattaatgtgccacttgggctaagaaacagatacacacacacaaacaaatattaatgttttatctaaataaccaaccaaaaaatatttaatgcttttatatccaaataatccaactacgatgctgacattcaggccgcccgtttcgcttgctccagtttttttttctcacgtgcacgcctactccacattactacccatgcagtacagtaccttcccccgggcccacatgtcatagagcgggggtacgtacaggcactgtacgcgtaggattctcccaggccagtagtacacccgaaacacgcaaagcaacaaccactacccagttcggccttaacgggtcgggttttgaactcccggacccgctaagccctccgctaataacctcgcctcgcctcggatccaaccaagaaggaatccaagccaagccaaaggtggcccatttctcggcttctcgctgctcttgctttgcttcgcttctcctcctcttcctcctccttcctcggcggctgctccggctcggattccggtgagccgtcgcgttcgtggtacggcggaggaagcgaggttgcgccctttccgaccgtttcttggctatccgccccgattggagaaagctgggtgtttcttttttctttctttttttggttcagggatcagagaagttcagaactggtggaggtgctcatatccgcgaggttgatgtctctccctctttccatttcattttggtttagtccaagaacttgtgttgcttgatgctgtgtggtatgtggtggagttgctgcgattttgatgtgtttttggagtgatcggttgttcagttgtcatttggggatttttggaagttttcgggttttgggatcggcgaggaggccgaaatttggagcgttttgtgcgtaattcgttggattgattacgagtgagaggcgattgattctcctttcagtagagagattattttcgtcccaagaatagttttcatggcgttacagttttgtctacgaatttattgcgtgtgtgggttagtgattttacagctataaaatgtgtttattagtggtggttagtcaaaaggtttagagggattattacttgacaagagtatgtggatagacgagtgatgtcagcacataaaccttatcaatgatcatgtcatcatacatggagtgcggtcccaatcctttttttaatctatcttgaaaatgtatttttgtgcactaaggttaattaattaattaattaattaaatcatggtctttcattggctaaactttgttctttgtagtggtttgtctgagttttaacgacattcgacaatggctgctgtggatagtatacgatggccttaatattcttaaaaaaatatgcgaggtttgttcaggacttaactactcaagtagttaacaattattagtgttttcgttcctttcaataaaaaatatattagggttgtttggcttatcttgaatcagtgttggtcgtcctgttggactttttgtcaggcgactcattttgtagtaaagcatatttgtttcactgctgatgactctaatatgtcaggattactgttgattctagtgtcagtttcaaagcagttaatctgttatctgaataataacatgctcctgtagccaacctgtcaccgtttatgctgattgttcttgcttgctcattcatctcttgtcatcgattctctaggctttgttgaaactgaataaaatttcaatctctgtagtcagtaccacctaatcatatggaggattatccaagtgggagatcaaaagcagctattggatttctcagaagaggtggtggtttctcttcgagaaatcaaagcactgaagagaggaccattcagaactatgatggaccaggaatcaccacaagactcaatccgatgaaaaccaggctgtctgataatcaggagagaccaagatacctacgtgactcattcagatcttcaacctcaatggccattcatggaagctcttccaaagttccgcttaggaaattcggtgacgaaaaacgaaggcaaacgttgttggcaggggtagacattgctgaaagtagcagcagaaatgctgggggcaaacatctggagggtagtaataagagaatcgttgtcgatgataggagttcagatgttctgcatactgaaacagaaggcttggctactgaacaagaccaattgatagcacccaatgctggagtttctgattctgctagttcgtcagatatttctgaacatgcagttgaatccttggtaaggagtgctgctccaagttctagaacccgtagacagaaggacaaagaattgaatttgggtcaatcaggagtttgctcttcgtcatgtactaacaggcctactatatcaagatatgctcctgccgatgtgaagcgaccgtgtaatcatgctagcggagtacaacagcatggtcataacaatctggactgtacttcagtacctaattttctgccatcaggttgctcatctggttctgtttatagcaggaggtttgatgcaatgagaaaaaggacttctgatgggggaagtttttctagatcaaggggcttaagtggaacggctagcttagacgattcacctcctgcataccctgccattgctggtcctagaatcagaacaactacaactgaacgggcttcacaacaaaatgcactaagaagcagaaggaattttcaggattcagcagtgtcagtaaggacaagaagacctccttggggtgctaggttcaggatctctgaggaaagagaggatggcatgatttctcagcgtgattcttccatagggaatcaacagtcagatcaggtgcattcatcttcggaagaggcctctacagagagctcctcaagaccattctctgcagaattacctcatgcaatttactcatctagaggagagggatcaaatgctttcactgcaaggagaagaagatcaagctccctttatgaggaaagacctccacagacattccatgatcttttcagagaaagaaatggccgaagacacatatccatagaaggaattgcagaggtcattttatagcagctccgtttttttctctctttccgaagatagattttatgtaggattacatcactatttttactccacatgcaggtattactagctctggacaggattgaacaagaagcagaactgacttatgaggttagtttctttgcctttgtgtcaaaataattccttgtgattgacttttcacttggaatctggataaattttggcagcaattgatggtgttggagacaaatatattgcttggtgctttcacctcccatgatcagcatagtgacatgcgcatggatatcgacaacatgtcctatgaggtattttttttactatgtttgtttggacctggcaaaaactttgttagtttgttcctaaatattttcatataagaagtgcttttaattaagtaaacggtcattcatggctcaacttctagcatgtacttattttagagtaatttcgttccctccttctgaacaggaattattagcattaggagacagaataggctctgttagcaccgctctttctgaggagcaatttgtgaaatgcctcagaagaagtatatatataccagtggctacaaaagcaaacgcgcaagttgtagacgacatcaaatgcagcatatgccaggtatcttgtcatcatctaagcatcaaatgttgtgttgcaccttttttagggagtctactgctactaatgcatagtgaaagactgaaagtgaaactgaagaccgaatctacgcttccactatcttacattcttatgaaatgaactgttacttcgctcttgccaatttattgaacactatttatgattgattttgcgtcatccctactacttgctgatgattctttttaacatacttgttactacaattaacctacagtgtccacagatgttcagagctcagacaactgttgtatctacttcctctgtttcacattataagatgtttttggtttttgaatagattcatgcatggatccatgtatgtgcttcgtatgtgttcaaatttatatggatgctagtgaatctggacgaggatggagaaaccaaaacgtcttataatatgaaagggatggagtagtactcagttttgtaaaacctgcatctgaaacctccatcacccttccaacaacggcaatcgattctgtgcctgtaaaaaatagccattaaaggattcatcaattggtttgaacataagaaataaaagggattactttggtaaatcgtcacagtaatgggaatatttgtctattccaggaggagtacatagagggtgaagaagttggacggctgggatgtgagcatcagtaccatgtgtgctgcattcaccagtggctcaggcagaagaactggtgtccaatatgcaaagcttcagctgaaccttctactgtgagctaatcccacctgggagattcaagcttgtaaatatttatcatggatttggtgtccatctttttgtggaaactgtaaataatcttgaccttgttcactccaatttgtgattatcaaatcagctgtgctctgaaaacaaaaataatccttcaatgtttctcatggttaaaaaaaaaagcttttctatgtttatgttggggtacctctcccaatgcaggggttgttctagagggtttgagggtggaccacccttgattttggcccaaaaagatcccttcttcatatggcccaaatccactacataaacacggcatactaaactatttatattgtgtatttttgaacttttagactcgagttagttggccctgttcgatctcccgtttgggagatactacaccgtcccagaaaaaagtttgtttgggagacacgtatatgtcctggtttgtaggtaggattggattcttttttggatggaggggtatatttttgttgcacgcaaaacgataaacctcattagcacataattaattaaatattaactattataaatttgaaaaatggatttatttgcttttttaaacaacttctatatagaaacttttttttaaaacaaacgtatcatttaacattttaaaaagcgtgctaacgaaatacgaggaagttgaatttggagttgaagaaatagaattgagcccgtaatgttgcgatattattactgtatttctatcatattttgagcaaattttgtatatgtatattgagtttgcatcattatgtgattttagagtgtgaagtaggaccaccgaacgaaaaaatcctaaagccgtcactgacccgaagtataacttagcggtactgtacatcaaaacatagtaagctgtatacatcaaccttcaacctaaaagattaaacttattagaaagagtaaactctccacttatatttgactttctttttcctagctttttgcactttcgactattctacggaacaaacgctgctttcaattatcaaaatgtataactacgttgtatacaccaaatatagtaagctgtacgcatcaacgttcaatctaaaagattgaaactataagaaagagtaaacactccacttatattcgattagctttggcacttttgactattctacttaacaagtgctgctttcaattgtcgataaaaatgtagccaggcaaactgtacctcccataaatgacacaacagtactatggatgccgagtgacatggtctttctcaagaaatgaaatgatggacaaatgcactcacttctcgagcttttaaaggtacgatttttttattaaaaaaatttctcagaaaattgttttaaatatattttcaaaattataatatttattttattttttataccctcaaataattaccacaaatcacacgttggccttggaatatatactccctccgatccaaaaagattgttactctatgattcaaaatttcattccttcctatctctaactactggtccgctcccaactacacattaattaataagaggatctatagtatttgtttctcgaactttaatctatgctaaacaatttacaatgataatctttttttaaagacggaggagtactatataggagcacgcagctgcaatatgcttgatcacaaaataaagaaaaaacacccaaattaaagtatttgcagtaaatatgtctacatgaaaaaaatatgttattccagctagaaaagccacgcagtttaaacttgagatgactctagtaccatattgagttgcataaacaaatcagttgataattgattgttccaaaattcagtatttgtgatatgtggatctctaattggccgaaacctaaagaggataatttacttatgtttcaacccttcctagcttttgcacctttcaacttttctatcagaaagtactgctttcaaatatcaatcaaaatggaaaaagaaaataaaaagacagaaaggtatgcatcaagctggccaaattgcgcatcctacacattacatatacaatgtatggacggtaagttacatctttggccctggaagatactgaaaatatattggcaaccacagtacactttaaatcataacttggaaaagaagtacccaaattgtccacagtaaccgaaatatctatatgagaaaagtcaccacatgcaagacatgcaaacttttttttctgtcttttccttttgccctctcagtccaatccaaccatatgatggtttgaaaaactctccaaatagttatgaaaaaatcttgaaaaatttactacactcatacaacatatatatctacaaaatcttagctccaaaatcaactcatagattaagatacaggaatgacaaatttagcgtatgaacagtggtaccgttcatacctgaatttgtattatttatttctcaatgtgtcgggttgaattcaaacttatttttttgtgaattaatagatatcactgtactctacgtcatcaattttgtaaagatttttttaaaactatttgtatcaaatttaaaataaaaaggtactccttccgtcaaaaaaaagataacctatgaaggtgtccagatttattgtactaggagggatccctcctaggttgatccctcctaggttgcctttttttttaggacggatggagtacacagtagaacatcctcctcgagagattagaatccattccaatgctgatgattcattggataatcaaatgtttcaatcgtccgttagatttttcctacaatatatctggacaggggacatttctaaattcatagaattatgatatatcatattagtactagattcttactccctacaggctgatactccctccgtttcatattgtaagactttatagcattgcctatattcatgtagaagttaatgaatctaggcatatatatatatatatatatatatatatatatatatatatatatatatatatatatatatatgaatgtgggcaatggtagaaagttttacactgtgaaacggaggaagtaatacttattgttttagataagggtgaggtcaaactatagaatcttttattatgaatcattaatcatttttaaaatatttgtcttttaaatatggtgactacatgtatagagtagtcttaaaaaatactttaataaaatcatatattcgttgacacttttatacatattataatagaaaaaaagttttaaattggttttttttggagaccgtgctctgtccaaaacgataagtattatcaacccggagggaatatattttaggacgaaagcaaataatacttgaaaagaaaggagagttgtcctagctacttctaatggcacaggctttgctttgcaggttcatcgcggacttgctacaagttgccacagctgctcgtgctcaacgtcagtggacagatcacagccgtccacacctcccgcctccgcagatccgacggcccagatctccccaaggcccccacccccaccttcccctccccccctccctcctcccccatcgtccactcgttcgtcgcttgccgcttcgtcttcctcctcccacccacgaattaatcctcctccatttttgctaatcccgacctctctccctcgctaatccgccgcgacgcgcacgcgcgcgcagtacaaatccgcgccgccgacctcgcctcgccgagcttgcgaggtggttccccgttcggcccccggggggcccgccatgggctagggtttgcgggcgatggagtgggacagcgactcggaggggagcggagacgaggaggaggaggaggaggaggaggaggaggagggggttgaggtggggggaggtggggatgggggcgtgggcgtgggagtcggtgggggattcgcgctggcgatcgagggggtgctgggcgcgtgcgggctggtggtgtcggacgcgctggagccggatttccccatcatctacgtcaaccgcggcttcgaggacgccaccgggtaccgcgccgaggaggtgctcgggaggaactggtgcgtctttgtgcgctctgaattttcctgattcaatccttaaatggcatttttccagttccagcctttttgtctgctctgctgttgttgtgattttgatcacatgatatgataggcgggcgataatgacaagttatgtgtttctgcagtgataggaaaatcggtagtaatccacactgaactatcataaattggaaaattgttgttgaattgtcgatttggactacggatatgatgattgcaaactgaatatagtgttgcatacagggcctgtgtacacgattggttttggttgtaaattgcaccatagtagtgggcttagatggaacatgctgaggactccaatgttgtgtcttcatagcgctgagttggtccaccacaccgattggtcatgttagttttgccggagcacgcttcgtatgtctcatatgacagaaatcaccgggaattttggttcagggtcctgatgctatttccttccttagagcatgtgttctggatttgcatcggctatgttagtctgttggatatggtacccataggataggaggggatcccaagtgtataacatgctagcagtcttcacagagatttttttttctctaagtctatgataggtttatcatctgatgctcttgctagtagtgtttatggtcgtagtgcttgttaaactgcttgattttgaaagttggccgaggtagatcgtcagcatgacacattatgtgagtattctgttcttagttgttcaagtgtctatgtgtttcttttcctgcctgtagtagttctgtggtagaatattattatctggctgttcactaggctctttccttttggttgtagatgcctactgtaattccagttttatcagtatttgttattagaagtgcaatttatatttatcatgcatgatgccagttacttaatacatgcaataccacacaagtgatggattaaaataaactgttttctcctgccatttgtactagcaccttagcaaaactggtatccttcccttatggcattaggtggtgtttggatccagggacttaactttagtctctatatttagacactaatttatagtattaaatatagactatttacaaaactaattacataaatgaaagctaatttgcgagataatttttttaagcctaattaatccataattagagaatatttactgtagcatcacataggctaatcatggattaattaggctcaatagattcgtctcgcgaatcagtctaagattatggatgggttttattaatagtctacgtttaatatttataattagtgtccaaacatacgatgtgatagggacttaaaagttttagtcccatctaaacagggtctaataggttctgtttcgaatgtagattttttttccaaatctcataggagtcaaatggattcatgcgaaatggcaaaaattattcctggtgatgttataaattgatttctctatagacaaatagggaatgccagattgaggttccatgttctatctgtggacctggggttggatgaatatggagaaattgtagatgaaaggaaacatgaccttataatttcatgagtatatataagctagattcttacaaattccagagtacgcctatgtggagtaggctgacctttgtgcatgttttcgtgcgctgaatcatgcttgagcgctaatttaactgaacttatagtggccttcattatcatgatttatgaggtagcagttaaggcacaactgcacaagatgacctttagcattactggaacagttggatcatatatcaaggcacttggggaattcctgattagaactccatcattatgactcaaaaatataaaaaaaaatatgtgaacagtgaacatgctctctcaattgctagtgatagaaaaatatgttttatccttggtccttgctgatatgattcacctaatgcagttcctcaaagccttttttgagctaccctgcaaattagttccaatatccttgctggtgtgattcacctcataagcattttttttgggcttttagcaaccttgcaaattaattcacatgctatgttagttcttgtatatcttatttgtattgctaacaattgttgtgtgctgttttcctcagtcgattcttgcagtgtagaggaccatttgctaagaggagacatccccttgttgatactacagtagttactgacattcggagatgcttagaggaaggcactgtgttccagggcgatctgctgaactttaggaaagatggttctccattcatggcaaagctccagttaacacccatttatggagatgacgaaacaataacccactatatgggcatgcagttcttcaatgactctaatgttgatttggggccattgtctgtctctacaacaaaggagattgtgagatctactttgattacaccagataacaccatccgaccaagtccaatggggaagggcttctgctcagagcattctgatcttttcctattgagtgatgaggtactttgccagaagatcctatcaagattatcgcccagggatatagcatctgtaaactctgtatgtaaacggctgtaccacttaacaaggaatgacgacctttggagaatggtttgtcagaatgcatggggcagtgaagcaactcaagttcttgagactgtggctggaacaagaagtttggcatgggggcggttagcaagagagttgaccaccctggaagctgtcacctggaggaaattgactgttgggggtgcagtggagccttctcgctgcaacttcagcgcttgtgcggcagggaaccgtgttgtcctttttggaggggaaggtgttaacatgcagccaatgaatgatacatttgtgcttgatttgaatgccagcaagccagaatggaggcacatcaatgtgagatcggctcctcctgggcgctggggtcataccctttcttgcctaaatggatcacggttggttttgtttggtggttgtggaaggcagggcctgctcaatgatgtgttcatgttggatttggatgcacagcaaccaacttggcgtgagattcctggccttgcaccaccagttccacggtcatggcatagttcttgcacattggatggaacaaaattggtggtatctggtggctgtgctgattctggtgtgcttctcagtgacacgtatcttttggatgtaacaatggaaagacctgtttggagggagatacctgcatcttggactccaccttgtagattggggcactcgctctctgtctacgatggcaggaaaatcctgatgtttggtggtcttgctaaaagcggtcctctacgactaaggtctaatgatgtgttcacattggatttaagtgaaaataagccatgctggcggtgtatcaccggcagtggaatgccaggagccagtaatccagctggagttggtccaccccctcgccttgaccatgtcgctgtgagccttcctggagggagaattttgatatttggtggatcagtggcaggtcttcactccgcttcaaagctttacctgctggatccgactgaagagaagcctacctggaggatactgaatgttcctggccgccctccgcgatttgcctggggccacagtacctgtgttgtgggaggtacaaaggcgatagttcttggaggacaaactggagaggagtggacactaactgaactgcatgagctttctctggtaagctctttagtctgaggatggaagtcaagtccccagcaggcttccagcttcattgaagtgatgatgtatacagagagaagctattgttttcatttgaccgaagcctggacattttcaccgttgaagccacacagaaacacaattgaaatgtgcaagcaaagtgagttattctccttggaagggtagtttgtgtttggttggaaagagatgatgactagtctcaagtagtagatccacttatctggttactcaccgcttctctgcgtcgctatttgtttggcctactacaaaataatagataataattatcacccataacctaataattatctgtttgttctcatcagatgtttcctacactcaaccaaaaggatctggaattgtatagttggaagctctgatgcaatgcaacaagcatgctcttcaaaggccaaaatgatagtgatgatgctgtactgatccaatatttctgataaattgttcgatcttttgttgaacatgcaaaactgttcgattagttgtacaccatttttttttctctggcaatacatttagtgtcaattaccaaaggacaccatatctgcagaaatcacccccccccccctctttctctctcctctctcacatgtgttgtatgtttaatctttaaacattgtgatgacaatgtctgttcacatagaccacacggttatacttttgtaactttgattgtagctgaaagcacctggattgatcattggaaaacatggagattttgcttccatacaaacatctgtcttttgcagcaattaaacattaatatgccaatgtttatggagattttgctgatatcctgaaatgtcaacatatgttcacatgtttttgggtcttaattttccttacctatgattgacaaagacggtaagaactaaataaagattaagatgcacatcctgaacaaggcaggcatcttaaagccattgacgcaaccctaatggaagtcaaccagaatcaagtagataagccaaagaagcaaccagcattctgacaacattagcagttcttatcctgcacgaaaaagctctgaaaacccagcaaaacaacggttagatgatttagcacgaatgctttctgccattcgcgagaagaacagcctaagcaacaagcaacattttaactaatcaaaatcatttacaaatctcagcacactccaacacgaaatcttctctacaaaaccagcatcagaagcaaagcgtcaatcaggctgttcctgtcatgcgtatgcttctcacaatccaacacacttgtgtcaccatgtgaaacatcagcaaaattctgaattttccgacaattatcgtgttagagagatagcagagagaacaaattgacttggcaaatttgtgagcttttcctgtaaaagtttggtgtatttccagagaaacatttttaagataaaatggattcccggagagaaaccttggatcaacattgctatagggtagtggttacatatttacataggaacctaagatgttgaaacctgctgtaaatgaacaacaatgaagggtttgctgctatcttatatgcacaccaaatttgggctgggatagcatcttccagatttttgagagaacaagaaaaagaggcgggtagaggcacaatattctggttgtggctgcactgcattacatttcagctggctggttcatcctagtagtatgaacgtctgcgtccatatctaggatccctgcaaagatcaataatagtagaaggcgcatcagaaagtgtcgagctcaaacaagagttgtgttaattgtgctggcttttcaaagtacacactcaagacttctctcaagagttgaaaatagagttttcctagtgattgtctcatgccctatgcctattttcctagtgagaaaataaactttttctcaaggaagaatgtcaaacaaaactctgcctattttcgcatcttatcatttggtgtcgacatgcgtattcatgcgttcatatcagctttcggctacggtcaagtcttttgagagctgaagtgtatgtccttttggcaatataacctcttaatagcaacagaaagcaagaaaaataaaattatatgcacacacctgtaatgactggcgatcctcctggatgctgcaatgccgggcattgctcctgtaactatatattcatcatctatttcatcaaatctgatttcccttatgtcaacagatcccgagggcacctcaatagtaaagctttcttggctagacctattgctgctcctccttccactacttctcctttcccttgctcttgctctacttctgcctcctgaagatctgcagaatgacttacagaaaatacaggatgtccaccagttccccctaaccctgtggtaaacttcatagtcatctccggcatcatcatcaccgtactcgatgacatagtctcccaaaactataccattaggcacctgtgcatgtatcgtgctcaagacatctatgatatctgaagactgttggaaattctcccaatcaactctccgagcaggatcaatttctgacgggcgtgaatttggatgcttctgctgggtgtgcttctgaagctcatgaaagttgcccacatatgaacaacagctttcttcgcagcatcttttcttttggttaagatgcagacgggcctcgtcaataacaacccacccaataacatcgcctctacacaacgggcaagctgggcggtcagttgtatttgacgaaatgatatgaatgctatcaagaggggctccattaaaagatgggactttcatattggtcggcagtccatgagcacctttgaaccgctcaagacagttcgaacgggattggtcagtgtcgcatatgaacggcctacaacccttctcatatgaggtgcacctcaataggacagcattatgaggaaaatccagacagattggacaagtgatatcctccatccaacttttatcaagtttggcatccaaatcgaaagaaccggccttcaccaccttcttcttcaccattcctgaacccatactgaacttccaagatgcaggtctgatgctaccgagagtatcttctaacgaaaacctgcataccacaatcaacaaatcgatttaggctcatagtaccataagttagatcacatcatacagattttccgtaagcaagtaaagcaacaagactttggcattcccatcattataaagaaaaaaaatcatcatgagcttaagaactaagacattagtacattacaacctttccagatcagcaaagttaaggaaaaatagatacagttccaattaattgtcctcgcatctagtgtcctacttgaacaagtaatgatcagctattgttgtcaagtgaacaggtcttagtttgcagcacaaaatgatgcaaaatcacatcaatgtcaactagcttcctaacactttcatatcatgtgcttaagaagtacccttgagaggtaccgctttaatagagcaatcaagcacagtcaaaattcaatgaaggaaaacaaagccatcccatgagtacaaatttatcaacctttttctgatttcacctcaattccaaaaacactactgctttatccaattgcaaacacaacaacacacagttttcacctaaacaacaacagcaaagaatcttcataaggcatgattaatcaggtgtagcagtaataatcaggtttgtttcttgatcctaaaccatagctggaacgaatttgggtggcctaaactaatcaaaatcggcgccgaaagctagaaaccaaccaaaacccaaagactgaacacatccaaatccagcacataaacacaaacaaacaaaaaataaaaacaaatcagcacagaatcacctccccctctcacaccacatgtccccaaaccttttaaattaaagctgagcaaagaactaaactaaagaagaagagagacaactctgaagcaaagcacatcacatgctgcaccacaacccaaaaaacaaaaaagaggaatcactccgaatcaaccccctccaacacaagaacaactcacagatcggctcagacccgcagaacccatcaccacaaaaccgcacaggaaatcatcaaatcaaaacaacaaccaagaaaacgaaaagaaagaatcacatcaacaagaagagaagagagacgcaccgcagcagcagcagcagcagcgacctcgggggtaggtgggtggcgccgtggcggagagaagagaagagaagagaggagaggagaggagagatgacgaagaggagacaagcctactactactactaccctagagatgggacctagacgcctactactcgccctcctctcctctcctcacctcaccacttctccgcctctctttctctcgagctcatgcgctcgcttccgcctcctgagctgctagtttattctttcttcttcttcttctattgggattgtactaccaccaccaccaccactactcgccgtggtacgagtataaaaaattccagctttttttcctcgctgccgtgagcaaagcggataaaaaaccgaactttttttttctttgtgggtgtttctttggatgtttgggaattgggatgagagagagagagaaaactcgcgatcggcggtggagagagaaagatgaagcagcactactactgactcggctccaaagttaacgtccagtactctctctctctctctcttcctcctcttttcatcttgtccttttcaacgctttaattgtcttctctttttttttttgccttgtgatgattccaaaagaaaagaaactccattttgttttaatttatgaaatattttcaaatatccccttacaggatggagtaatttatccaaaaattgcagaaatttatgtagttctatatgaagtttacaaactgttatcttcgttttagaatgtaaggatttttagaatttaatttgtataccataatataagcattttagcattgattcttgtgaatttcattatttcaatagtcccatagccaataggaaaaataatctaagcaatttaaaaattaaaaattgataattgaaaggtttaaaataatcttttgatccaaccttagtccttaggaaacaatctaaaatatgaatatatttagggaaagataaagtagaaaataggggtttgaattggaatggaattatggaggattccctggtttcatggctggtgaggttggtgattcaacgtccctttaaattgttgataacatttcaactaccggagacaaaacattcatttatcataacacagtgtacgattacgcagtagtaaaaagtatagtagtagtattgattatgcatgtgttagatggtattcgctgcagtactacgtcagaatttacatatatatatatatataattcggcagatgaacacatcaggtttcagatcaacaaaacaaggaaagaagaaaaaaaacacaagtactatcacttaagagttgtgcaaatgattagtttctgctacttaactaaaccaaaatggcactatttaattcgtctcgtggcttccactcagatttgtttaaatgcggaggtcaagatgattgtctcccattggatgggcatttacattaattaattaacacaaaatactattcaatccacaaatatatacttgtcgtattaataacgacatagacttctgagtgacatttcactagtctcgattgttttttttttgaaagaaccattaaaatatcatatcgtgtatatacttttctggataagtcctcatatatttttttgtggatgcaatctaaataatttcaaaaaaaatgtttatgccaaagttatgataggaagtatgcataaagcaactagtatttgtgaccagaaagaatatgcatctggctacctgatctttcaatggaatttcttatagtttgagcacgaaattggtacaaatatatcaatattagagccacttgagcggttttgtcaaaaaaagaattagtcacttaagtaaaattcccaacttccttccagaaatgcactgtagtatttattgtgtgcgttgtgatgcttttttttttcccttctagaaagtagatgcaacgacatgcactttcggtaacctgggtcattagccccacattttcttttctttcagttaaattgtaatgtgccataaagacaaagaataaaaaaaggtaaagaaaaggaaagttaattaaaaaaggacggttggcttgtgtggaaagagtaaaaaatatgtcagcacagcagattgaggcactgtttgtttaggcttataagcaacttataagtcaaaaagtctaagccaaaacaaaacaatcagcttttttatttggcttttttgaaaccataagccactctaacactattaagccaaaagttaggttggagaagttttttttggcttgtataagatagatgtatgactccaccactaaacttagaacattaaattcactggcttataaattatataagccaataagctaacttaaaagtctagatcaataagcctaaacgtaaataaagagggcttgattattgcaaggctaagcaaaagcttaacagacgggttgtttattgcatctactgcgatatgatcttcacaagtggtgaatttttttcagtctagtttagtagctatctaatgcttctctgcattttgaaaaaagtaaaatcatgtgcagtttaatcctttggcttattaaaaaataatttatgagcaatcattagtgatttaaaaaccaatgctacaaaataaacttagataaaaaaaacctttaaatcaaaattaaaattaagttttaaaatttaaattttaactgcggttgataagctaaacggaaaggatggtcctcgggttagattcagtttggtgtccatccaattaacctgatgcagcttaaatcaacatttagtaattttgtgaaaagaaaatgtgttcctacataagtaaatttaaattacagttagtttactgcactcatgtgagcaattaacaaaatgtataaatgcacgttttttaagttgacaaaatgtgcattcatagttgtcacgtgacacacgcatggggccggggtgttttgagttttgacccatgcatgtaagccttgcgccattaattgcgagtgcatgattagctcttccaaccattttttttaattttctcaggaatcaacggaaggaaagagcaaaaatcaaaaaggatttttccttgtttagttctaatttcttgtttctattttccatttcagttgttcatgaattataattataataaaatatgtacacacagtgcttcctctcatattattttaattatgattcccaatgtattaaaaatattaattattttggcttatcaattgattagttaaactagcctttctcatccagattcaattatatttgtgtggttctgttttaaaaactgcacacctcataaagataggagatcaccatcatcgtttggctggcaccggcagtgtacgtgccgacgtgttgtcttgaatcacaaataattaaagatttaaactgatttcatcaattaatcatttactaatttaatttcagaccatgccaaggttggtacacgtccaccgatcaatcaacccaacccagagagatcgagcttacacgtttctcgaacacgcacgcgtgcacacacgtgtcaagcatgcctaattgtatgcggtagaaaattgttttttttttgggtgtgcagataaagattttctttctgacagttcatataggaaagtgaaggatttttctggttaagtatataggatgttgttagattcagattaggagatggcaaatgcgaaacataattgttaacatcactagtagtatcatgcaactgattaattgcatgtttgtaaatttaatgttgcctgttgcgtgcaaggaatggattggaaaggagattactccaagatttgatgttaatttgattatggagtactagtatgtcattagcaagatcataaagaagagacacctctaattaatcctctttgtatgcttaatagtactgcatgcacaatgccatacaatcattaaatagacggttcagagcaagaaaaaggaacatatatacgaatccagaacacaattactgattgatatttatcaattgaggtggcagatctgatcaaaaccttagaaatagtttaacaaagatattacttaaatgtgctgcttacatactctggatttttctttgcataggctcatatttaatatcgaacaaaatcctccggtgggattggtttaacgtgggtgctaatggggaagctaccctgctggatcacattgataaaagaagagaggcgaaaaaacaaagagaggaagaggagaaatgactcgagaggaagaagaagatgattccctataatggttttttttttatccgtccctactcctcgcaccttaaaaatatttttggaggagggaacgtaaaatcctctagccggtaaaaaaacaaattataaaacgttttctatgtaattgctaaaaatccttaagattcgtactccctcttttatattacacaaagttgtttttttaagttaaacttttgataagattgtagaaaaaaatagcatcattctcaatacaaaacaaatacattataaaaatgtattcactaatgatttaataaaattaatttagtgttgtttctataaatttagtcaaatactaatgaaataacttaagacaaacctaaagcatcttgtaatatagaatggtgggagcaatataaattaaaatattttacaggaatttcatagaaacccatttcttcgttctgaaagatctgttccatttctccttgttgcatcagtaactccaaaccaggtcattagttacagcgtctgccaagagacgtcggtgcctccatctcggcccagcccaatagcccatgtcatagtcattctcttaaatgggcctgaaatttatccggcccatatccataaatgggctgaaatctcagcccggcccgaagtaggcctcagtacgatttttccaagacgagcaacgaaaaaaaaaagaaaattcacgcttttaccaccaccatctccggcgatccggagcaggggcgatggcggcgcggggctgagctccagcggcttctccggctcggaggcgcgggtgcccccccagagacagtctccaccactctctctctctctctctctctctctctctctctcctacagttggtggcgcgcgaatggcttgccgcctgcttctccgccgctgcctctcagccgcggccgcctcgtcggcggcggcgcggttcgccgtgaggcacgcccacggggagcttgaagtgagcggatgcagcgcccgcatccgcgatctcggccgcctcggccgcgtgggggaggccagggaggtgttcgacgcgatgccgcgccgggacatcatcgcctggaactccatgatctctgcctactgccacaacgggatgcccgacgccgcgagggacctctacgacgccatctccggcgggaacatgcgcacgggcgccatcctcctgtcgggctacggccgcctcggccgcgtgctcgaggctcgcagggtgttcgatggaatgctcgagcggaacaccgtggcgtggaacgccatgatcagctgctatgtccagaacggggatatcactatggcacgaaggctgttcgatgcaatgccgagcagagatgtctcatcatggaactcgatgcttactgggtattgccacagtctacagatggtggatgcaaggaatctgtttgagaaaatgccagagcgcaatttggtttcgtggacagtaatgatttctgggtacggtcgaatcgagaaccatgggaaggcttgggacatcttctgtaagatgcaccgtgaaggactgctaccagaccagtccaattttgcctctgcgctctcagcagttaagggtcttggaaaccttgatgttctagagagcctccgtgttcttgccctcaagacaggctttgagagggatgtggtcatcggcacagcaatactaaatgtgtattcaagggacacgagtgtgcttgacactgcaataaaattctttgagagtatgattgaaaggaatgagtacacatggtcaaccatgattgcagctttatctcatggaggccgaatagatgctgctattgctgtctatgaaagagaccctgtaaaatcaattgcttgtcggactgcacttatcacaggccttgctcaatgtggtaggattgatgatgcacggattttatttgaacagattccagaacctattgttgtgtcctggaacgccctgattactgggtacatgcagaatggaatggttaatgaggcaaaggagttgtttgataagatgccttttcggaacacaatatcttgggctgggatgattgcggggtatgcacaaaatgggagaagtgaagaagctctgggtttacttcaagagctccataggagtgggatgttgcctagcctatctagtttgactagtatcttctttgcttgttcaaatattgtggcacttgagacaggaacacaagtgcattcccttgcagtaaaggttggttgccagttcaatagctttgcatgtaatgcactcattactatgtatggcaagtgcagaaacatggagtacgcaagacaagtattcagccgaatggtaactaaggatattgtgtcatggaactctttccttgctgcacttgtgcagaatgatctgttggatgaggccagaaacacatttgacaatatgctcagtcgggacgatgtttcttggactaccataatatctgcgtatgcacatgctgagcaatccaatgaggccatgggggctttcaaaacaatgttttgtgaacatgagttacccaactcaccaattttaactatacttcttggtgtatgtgggagtctaggtgcttctaagattgggcagcaaatccacactgtagctattaaacttggaatggattcagaacttatagtagccaatgctctcatatcaatgtatttcaagtgtggctgtgcagattctcgtaggatttttgatctaatggaggagcgagatatttttacatggaataccatcattacgggttatgcacaacatgggcttggaagagaagccatcaagatgtatcaacatatggaatctgctggggtgttaccgaatgaggttacctttgtggggcttttaaatgcatgcagccacgctggtttggtagatgaaggatggaagtttttcaagtcaatgagccaagattatggactaactcctctgccggaacactatgcttgcatggttgacctgcttgggcgaacaggtgatgtgcaaggagcggaacaatttatttatgatatgcccattgagccagatacagtgatttggagtgctcttcttggggcatgcaagattcacaagaatgcagaaattggtaaaagagctgctgagaaactcttcagaattgagccatcgaatgctggcaactatgttatgttgtcaaatatatattcttccctagggatgtggggtgaagttgcagaggtacgaaaaattatgaagcaacaaggtgtgataaaagagcctggttgcagctggacacagataaaagacaaaatgcactcctttgtcactggcgataagcagcatgagcagattgaagagatagttgctaccctcgaagaactgtacactttgttaaaggctacaggctatgtgcctgacacagaatttgttctccatgacattgatgaagagcagaaggagagctcccttttgtaccacagtgagaagcttgctgttgcttattgccttcttgctacacctaagggcatgcctatacagatactgaagaaccttagaatatgtggtgactgtcatacttttatcaagtttgtatctcatgtcaccaagagacaaattgacattagggatggaaatcggttccatcattttaggaacggtagctgctcctgtgaagatttttggtgatatattttgacttcagatgtgatattggcatattgccacttcagatgtttttattgagttgtagaatacagagcagattgcattttgggtgcaatgttcaaatggtgaacagttcgccatgagccctggtattcctgccattgccattctccacgtcacaacatgaatcgacacctggtgagtgcctaacatatttggctatctagtttgcttttcaggtagtgaatctctcttgaacagacaacttttaaatcaaggtccaatgaaatgttaatttatgttggcactgtgatgttttagtcaacagttaatgtactagcagctatctctgctacctcttacaggtggctcagaagaacagccagctaatagctcaccttgtatgagatatactcatcatagggtaggatatttggtcactaactttacttgttgaaatacatcaaccgacaaaaacatttgttggtgactctgaaccttgttcggtctattttgagtcagatgaaatgaaagcatgcattgtaacttctggagacctttgcctggagcctaacactcgtcagagtttgtggcttttcagacatgtactacgccaatagattcctgggatacaggtttgtgctcgcttctaaaatggcaatgtgttacactgataaatactaggttaatgctacaattgaatttttcagacgtattaaatctttttttcctctaaaattattatcttttgttcaaaaaggatgtccaacttacttaaggttttatattattttcagagcttatcaagaatttcatcttaaaagaactaatatgcatgctgaccgtatatgtgttgttcttaccacgattccagatcttctctcatgacatgtgactactaatgatataagggatacactgagatggttacggtgaaaaaaagaaaaagaaaatgttgacaacattcaggatcgtagagttaatcaggtaatgatgattgtttaagttgtaccattgtgatatacagctgttttgattgcgcatggacttgtatgcttgtacagttgtacaccatgtcagatcagagctgtaggagatttgaacacgagattgcagagtcatatggtgcaggccaatgagtggatgaagaccccgacaaatgataagtatgtttcagaatttcctttgtcattgaagatactgagttgatgtaggttgtcacagcctcacaggggagttggtttgtgatagtgttgtaatttgtgagctggtatacccagcattttctttttggttttgtaagatcacaaaacctatattttgcttccagttaagcaagagcatgacttttattaaaaaaaaacagagagagagaggaagcgatggaagggtgttgactgcgtgtgttggtacatccaggtattatagacaagtttgcatgcttagaattagttgataggtgagttgttatatataggataaaattgctgagttgacaattttaagcagatgcatcagtcctgcgtttgtttaaatgttgttgacagttgcgtgcacgggatgaatgaattagaagcttactcaaaggtttgatgtttaattggattgcgtactgcatcaagcaatttacacaaggacagcctctaattaatatatcttacaccaaaaacttcaaaatccggacaccatcaccacatcaagcgaaatggatggtcatagaaagtagaaacaaagaaaagaaaaagaaaatgaactggagcaaatgaaagtttcatttcaagtttcacaactacaactacgaaatcgacacaaacctaagttttttttgaagataaacagtagaaaatttatatatgtaagatcgaacctccatttcgcatgtaagatggaagctgtcatcttactgcaggcccaggagaaactcttgatatctccccagattgctcttctacctcaagtgcagtctcctctccaagattgctcacgctcacgtcatcatcaccagtcaccaagtgcttcctatcgccatggctctcgagctccaagctctccttaagctgtgccaccacctctgtcatcgtaggccgctccctggagacctctcgcttgcaatgcagcgccaagtcagcgactttccagaccgagttgatgtcgtagcctccccctcctcccatccttgcatccacaatgctctcgatgctgccgtggtcgaggctctgatgcacaaactcaccaatgtggatgctcacgctctcgtcgatggggatgacgggagggcggcctgtgatcagctccaggaggacgacaccgaagctgtacacgtcgctcttctcgctgatatgataattgcggtagtacctgaacaagatgggcagaatatgacatggaagttcagttacttggtagaactgaagatatttcattttgaaagaaaaacaatgcgattgttcacgcgcaatattgaaaaggaaagttcagtatacgagagttagaggagttactcaggatccaagtagccgaatgtaccagctggttcagtggtcatatgtgttctcgattcactgaataccttggtcagtccaaaatcagcgatcttagctccaagatttgtggtcaagaggatgttcctactcttcacgtccctgtgaatcagtgctggcttacacgcgacatgcagatactccaatcctgagatacacagatattaaacttttattaggtaataaactaataatgcgcgggtatgaatgaaatatcagaaaactaatagtagtattttgccgggtgaaaattaatagtagtagctagttaagttttaaccttgtgcagcatcaagggcgatgtgaagacgctgctcccaagtgagtggcttattagtagtagcttcacatatcaacagaaaatgaacataatcagtttattgcagattttggagaaatccatggaaatgatactttctaatatatctatgtggttttcatttagcaaccgtggctgttcttgtgtctttgcaattctcctttgagaaaaatgtaggattactctataatctgattctaaagatataacagacagctaatctccctccattcaggcctcagaacaacttatgttcgtataattgtatttatattagccattaacagtattttcatgataaaccaactttatcttttactagcatgacacaaacaaagggtcaaagctctacataagcatctatatttggataataagatggataacctctcagatgatcctgaaggttcccttccggcatgtactcatacacaagggccaaatgatttttgtccttgcaataaccaatcaaggaaaccaaattcttgtgatgaatccttgtcaaatgttgggcctgaaatataaaattcagaaaattcaagcatagcagatatgagagtgattagtaagtagcataatttatctacaaaaccaccaaatattgaaattgttcgttcatcagaattcagaaacagatggttacacagaaaaaacatgtgtaaggaaaacaaactgcatttttgacagtatattgtagacaaaatggtacgagttatgaaagagctgtgatacatacaacttctccaaattaaaaattactaatacctcagctagaaactctttacccccctgtgaagatgactcggatcgcactttcacagcaactgggttaccattttccaagtaaccaaggaacacagctccaaacccacccttaccaacctgctggctaaagttattcgtaatatgcttcagttctctgtaagagaattctctgttctcaagtaatgctgattcatatgtaggaccagcagctcttctcttgtctgacatgtcagtaacacattttagcaaatatcaggaacatagttaaatgcaagaaatgctattgttagaacaaggcaagaaaaacagcaaacaatctgtaatgcactaagcagatatctcctactgtcctcctgactttattaccttttgccttgagcattcggcgcagaagaagaaataagacaacaattagtgcaacagtggcaactattgtaataattattgcagaaagaagtgaccctttaattttcttttgacctgatccgcattcagtatcgttgccacatagttttgcattataaccaaccctgacagtatcaaaagaaagcagtgattgtcattaggaatatgcttccatggtattcaaaatgaagagagtatgctcaattgaaaaggctatagaagaaaactttttctctatatacgtaaatcagatctaactattaactaggttaatactgaacctttttagagttccttcaacaacaaattgtccaggaaaaaaactaaagtacccttaaaattattgggaaagagtaaattgatatctgaaatctttccatgctttcctactacatttgagaaagtgaagcatgaccatggattttcttttactgcttcattgccaaaaatattatactaaaagtaattcaaataaactgaactattgaagaacatagaaagccaaataatagaataatcaaactgagtcacccccggcctctgcataaaatgcacacagccaaaaaagaataaatttatagaataaattgaaaaaataatatatgattttaattgttaagtactttcgtaattaactgcatccttcaatcacgttgaaagtttaagtaataaagttattatggaatattttcttcaaagcataatttaagttcagttatccgtgcattctatatttttgtaacatagaacataccttagtgacaaagaaccattttgtgatttttgaagaagattgtaaggaattggtccactgagatcattgctggacaggtccctacaaaggaaaaatatctcatgatataccaaaaaagaaagactattatgtcagaattccaaaatcaaaacaataaaacttacagaaacattagtaacggaagctgccctagaaaatttggaattggtccagacaagttgttgtgtgacaaatccctggaataagtaacaatacttgtgtattatatctagaaaggaataaagaaattcaatgtttcagaaatgctatttatcagacttcatcatgacaggatacagaaaaatatgcaactattcattgcgtgtaaacaataaaacttctctatttcaccaggttaactctgtcaatatatatcgccaaacaagagcactattgaagtatcatttcccgactacatggacaaacaagcaattctctccttttttttgttgaaaaatatgcagtacatacaattctttcaagagaaatactgtgatctactgtgaagtgtgaactcgaaaaatccaaaaagacagtccctaaacaaccgtgtatttttttaacatattgatgagtaattgggctccatatgtaacactcccaatcatcttaggaatatatgcccaatgagtccttaatcctcatgtgttggaattttgctaatagttttgcaaattccttggtaaatactaaatacacaattcagtttcaacaagaaatgagtgttttatttttgattagagcaatcactagtacttcaaaaacaaagaaatcggggacactacataattcattatgaaggattgcggtgcattaaaagttctgttatgagacgtgatggtgagaacctacaggtactggagtgatttgagatctccaaaataagtagcaatagatccagccaacccactggaagacaagtttctgtccaaataaaaataataatcaagaacaattagttctcctattgaaatgttgtaaggtgaataccaaaatatgccacctatagcaatggatattctttatctttcaaacatgaccatgaaacttacagtgatgttattttagaggaatcagctggaggataggaacagtttaatccttcccatgcaaaagcttttggagcacatggatcgcccatccagtttttcttcacatcataattttgttggacttccatcatggctctagctggtttgcaagaacaaggaaatgatcaagctcatacgaaatgaacaatcagcaaagaaaacttttgagatactattgcatgtcaaatgtgataaacaaaagctgtagcattgtcagtgtactacctcttatggtgcaaattgcatgtgaagttaaaatataatagaatttgatgataatgaacataaaattgcgccagtaaattcataccgtctctaggatcagttgcaaactcagttagcggtttcaccaagtacatctccatggcattgaggataggtggaagagttgcatttttcgtagcaacaagtgagacactataacttgccagcccctgtacggtgccagacaaggaatcggcaaataggaatggtggagtataaggttgtgtgttccatgtattgttattgacaataatatcaaactgtctcagcccattgctcggtacagactgtaactcggagaagtagagcacaaagaagtatttggagctgatgttcaccgatgggtcagatggatcccaagtgaaattaattctcgagctattaactgttgctgcactttgcatgacagctgatggtacatcatagacatcagtgaggtaattctgaactactgatgttgcagatatctcagtccagtctgggatcgtatcatatgttgaccaaagccggtcgtggggatcaagtgggtatctgtttggacaaaagaaaaattatttgtgtgatctagtatactagttcactgaatttagtcaaaacgaccatactatcgttgaaaagtaaagcttaaagaaacacaattcatgcaaggtgtgactaaaactgatacatctgcattagttcatagagatatttcaacaagtccgcaagatacccagccatcataggtactcccaaatgttggcaatatttcagtttttaaccaagatggtaagagaaccaacttggttagttaaattcaaatcagagttcagacagaacaaaatctaaaactaacctggttattgaattgtctgtgggtcccatgttgaaccgattggaattgatcagcaccaaagattgagttgtatttgcctctgggtaaagagtactcttcagtggcctcaaatcaagcccagatataaacggagttcccgtccctttgttcaccaaacagacttgcaggtaatcagcaggagccacaactatgatgtccatccaattaactgcatcggcattactaaacttaacctcatgccagtagtttgcccccaggtacagatcaaagacaggaagcttgttcaggctatcgtaatttgcatagtagaagacagctcgaacaaagtacttgtttccctcctgcaaggacctcagggtgtagcagttccgtgtgccatctggaaagaatcggacattgtaattgcgctgtgccagtgatggtttaatgtatgctgaggagatgttatggtttgctcctgtgctgatgaaaccatagtccgaaacatatattatacttgatgtgggatcttgataggacgatttctctggaatgccgcaatcgatgcttatgaaacctggatagaaaacaccaatccaaaattctcagtaaatccaccatgatcaagaaacatacctctgaatgatacatgtgaacattgtgagtccgcagttgctttccattgtgtactgcctgaacataaagagttgaacaaattaggagcagcacaccttgactatcaggctggccatggacaaattgcaagatgtagaacaggagaattgccgcacatatgttcatccttcctgctcactcttgtgaacataactgcataaccagagcactgaagctaacagaaggacagagactatgcatatatatccatgggactaactgatgcattcatattatactcaggtgtcctactctgctatttttataggtagtcaaggtacaagaaaccactaggtcaactacgatacaataaacaaattacttgacatgctacttaattatgccacgctgatagaaaggatgcagatatgacaattttcttgaaacctttgtaattatgtgaatgtcttgtttacattatttgaaggctgtctcattatctgttcactgggtttcaactctcatgatcgttattaacacaatggaatggacctggcccacctggcacggttattattagaattggcaacaaatctagggaaatcatccaaaaaaatagctaaaagaaaagaaaaggcatagcatctagttaactattaagctagagcttctccagagtggaactgacctgaacctgagcaaaaactaattccattccaagtccaactcagctcttgacactccataactttaattttctccccataatattcaatgttatcttgcaatgcatacatagctagctagtcaccatctatcatcaacctagtaagtaatctcatacaataaactaacgagacgatcctgacgaatcttacaagtggcacatcgaggaaaaaacaaggaaaaactagccactataattgctaggtacgagtttacaaattacaaattccccaattaataaacgagcgatgaaccctggcaattctaccaaaaatttcataatcctttaacaacatccatgtccacgacaacttctgaatccaaaggaaacgacgtgagctgcgcagttggagccttcccccagcaacattgttcaggcgatatcgatccacaaggtgcggaaattgcgtacctgaacctgacgaaggcgacgacgcgcgcggcgacttcggggacccagcgcagccgctcaggggcccgtcgcgtcgcgtggctgggggcgtcccccttccacctccgacgacgtcgaggcatcgaagtcggcgctcagatgaggccgctggccggagacggccagtaatgaccatccagttgacggaattcgtcgaggagtggccagaaatctctactctccttgaactcggccgcagactcctgcgcgggcgccgtctccggcgccgacacgagggtgtcgagctctctcgagcgacgcgcacggcggcgagcgccggagcgggcagaggagggcggcgctggcgccggcatttcgccgaacacggcgcgggtggactgtgtgatcagtggagaagttgaaattgagatggagaaaccgaaggggagcaatttgggccttccaggattgggctcaagcccaagcccaagaaataatggtagaacagagcccaaatcatctcaaatcgtacagcccatttcaaacataaaacttgtgaaacccaacattttttttaaaaaaaaacagacaataagtgaaatgcaacagaacattaaattgagcaattgatcaagcagatgatgggagtagatatatcggtatgatttttttttgttctttttttcctttttcattcctttaatccctacatcttctatgttcaaatttcaaaacatgaaaaaaaaaccctctacgaatcatataaacaaaaacgaatgtataaaatttcccttttttcattttttttattattatcaccattcaccaatcagagggggtcatataaattctctcatctcctaacttatacaacatctactacagatcatcctccgccaccggcgacgtcgacgacggcggcgcgtcttccccgcgccgccgccgctcgagctccatgagcctggagaagacgccgaccatgggcgccgtgttgtacgtgcaggcctccgtctgcatgtacgcgccgcggtggtcggtgaacacgtcgttgccgttgggcccgccgacgacggcgccgacgaggtcgtgcgggttctccgccgccgcgctgtaccacgagtcgaacccctggaggcacccgatgaagtcgcggtcgcgcgcgtacgacgcgctcgacgccgcgcggtggtgcacccgccgcgggtacgcctcgccgtacccgacgaggtagctcgtcgccatcgggttcgtccccagtatgtaatccgcctgcgacctcgcgaactccagcacctcgccggcgtccgccgccgcaggagcggcctcgtcggcggcggcgtcggggtccgggcagaggagggggagggagaggtaggagaggacgtcggagtagacggtgaggaggaaggcggcgttggagacgtactggaggttgttccacgggcggatgaagaggaggcccgccggagtgcggccggcgttgtgggcggcgccgccggggttgcggcccatgcaggagcacacgtagtactccgcctttgacctgtacttctccagcacctcgcgctgctgcgagctcagatgcttctcctctaccagcagctgctctccaatatccatccatgcattatcacaaaattattgttaataattattactgcctgattaaatatgatcaatatatgcgaaatagattaaattctcgtgagcaaattaaaaacttattagaaagagctcaaataataccacaaccaaatttaaatacattagagtacttttcactttcttcggttttgacatgcaactttgatcatttcttttagtattcaaaatataacgataaaatctaataatattgtaatattataaaaatacttgcaaagaaaaatttacccatattatttttacgttaaaactaaatattttgacaactatgaatagtcaaagtttcaaaaaagttttggccgaataaaattggcattgtaatatatttaaacgcggaggtatagtgattgttttaagaagaagaaaatgtattacagatgtagagaattcttctgcatcggacaaatgcattcactttttaattgcgtgaaaacataaggttctacgttatttcaatgtcaacactcacttttaagttgaaaatgggtactacaagagtccatacgagtacttatcaattagaaagtgagacatcgagagaaatgtattttaattaattaacggttcatgttagtcaaactatctgccaaatctctacagttaggcatggctgactttcaggatagccaatgccaattagccaaaatacagctcatgtaggctgaattttagtgttatatattcaaatgcaaaattatctggagatgctcacagtacgattaaattattaaggcagattaatctacataataactattataatctgggccacatgatccttactgattaagttgtcaggactctggttgtgatccaaccactatatacaacttttcttgtgctgtcagacatgtaactactgtttgttgaaatgttgaatgcctcatgcatggccatgatataatattgtttacctcagatatgcatggcactttgtgttgtccacattagaaagaattgtctcaagctctcaaaaaatacattttcctctcctcactaatggcaatagaagtccaagatatgcacatcaatgccagtcaactttttcattaataacagatgaactctattggacagtagcagaatgtctagcagctataagcctaggaataggatatataagattaattaactgattttcttacttcaaagatcacattccaagcatggcagagaaggtaagacaggaagatcagcttatggatgaatattgaaatatgggcatggtaagagctgccttgtattctaagcatggggaaaaaaagactatggtcaatggagttatcattaggaaggcagtccatttctacaagacaccaataatgtcatcagtctacacctcagaaaaaaaaaactattccaaggttaggaaaacagtctgtttccagaagaatagttctacctagaacacatgtggaaaaacgtttgaaatggttagcataggacaaaggcacagttggaggaaaacaatcagcatgaaaggtccttaattatttaaacaaattgatcatcattcctaaggcatctcactatctttccttggggtgaattgagaatcatatgctagctttttcctaagtgccctccttttgtgcgagaagaatcatctcctcagcttaatcatcaatcctgatgcattcacacattgtatatagttgcatggtttgtgtggcaaagaaattaaatgcagatgccccaaatccaaattaaatcagcatatatgctttcggtgcgttctacacagctttgcgaaacaactacttccatgttattcataagcacacttcccaaattgctaagcgatatgttttgtgaaaaaaaattatatagatgtttctttaaaaataaaaaaacatttttaaagtttgtagtaattaatatttgattaatattgtgctaatggcttacgttgttttggcatcgaaaatttcagcaaacaaactcagcctttgtaagactctataagctatgcttattcctctacaagatggggttgttggtggccaaggcattgcatggtggtgcatccatccacgcatcaactcccaacacaagcaaagccatggtagctctagctagtatgcttgtaagccagaacaagcaaaagggcctttgcaccaaacagccttgctcctcatgcaactccaatggctctagtttgcagggcttcttgcagttacacaatctttttttcagtccatccacatcagagtaggtcagccaagaagagggtgtcaatttagccatctcctgatcaatcacctaattactactgctaattctgatgctaatgcctctgaataatttggttaattaattcagtctgtcacgcgatgtgtatacgtcaacaatttacagctagcgcaatcaccggtggaaaattcgatcttccgttggtcttgtgcttaacagttaacactgacagatgccggaattaattaagctaatcagatgcagtcatcaactataaagaagagctgtagtagactgtagacagtgtatactacagtgtatctgactgcatggctgaccaaaacatgcaggttgattatgcatgcagtcactcatgcgtgcgcgcgtcagccatatctattattaatttttcagcgagcaacaacataaattaaaatttaaaacattcctaacctttctttcaataaaaaaaactaaaggattcccgggtttcatacgcaacagaatttcaatattaatatagagatttaaaatataacttcttttaagcattaaatttagttaaattcgttccaaggttctgatccgccaccgcgtatttatgtatgtataaatgtaagtatacatgtattatgtacgtaccttggaagcgaggacttggagtccggcgtacttgatgtcccagctgaactcggagacggcccagccggtgccgccgaagtcgtcggcgttgtcgacggcgtagtcgaggtattcgcggcggccggtggcacggtgcagccacagcgccgcccacagcagctcatccttgtacccacttgatgatgggtagtagttctttaccacctccacactctcgtcgtatctccccctgtacttgtccccaaactcaaacaactgcacccacaaatacatacaattatacttttacgtataattatgtacctgctcttcaaaatatatactttctacagttcaaaatataagtatttggggatagggtgatgtacatataaattgtacttgtacgcataattacaaatatacatactcttcaaatactccctacattcttaaaatatacaagtacttttatgcgttcctcaaaatgataccttttaaaaaacgtgcagaaatatttatagtttagtactgaggtggtaattttttttaaaaaaagaaagtcaggaaaacagttgctctatcgttgtcatgacatttttttgatgcgaaataattaggtgattaagcaaaggaaaaggtagcttaaagcgaaattaaaattttttgattttcttttttggagtagtgagtggtgagtagtgagagggaggacgtgcctgctgagcgtggtggaggaggagatgggcgtagtgggcgtcgccggcgcggcggaagacgatggatgcggcggccatggcggcggcggtctctgcggcgacctccgacccggggttctcggcgtccaccttgtacgcgtgccgcgacgtcgtcatgtcctccggccgctgccagcagtagtggtccgagtcgccgtcgccgacctgccattaatccattattatatctatacacgtatatatatcagggtttgaaattctggaacgatttcggaaatttcgcttatttcgtccgacccctctgatacaataattttggtaatatttgtttaaattcaactaaattttgtttaaaattttggaaatttcggcatttcggtgaggtccgatcaaatcgactaaaccgaaagatttaacactgatatatatacggtgtattgtgcgcgtatgtgtacagtatacgtattcgtgtacgtacgtacctgagtccagaggacgttggggtgggtgtgcgccttgatgaagtaatcggtgccccatttgatggcgtggagggcgtggccgagctcgccggcggcggcgatctcctcgccgtactccagcacgctccacgacagcatcgtgacggtgaacgccatgggcagcccgaacttgacgtggtcgccggcgtcgtagtacccgcccaccaggtccacctgcatgcgcacacagccacacacggcggtcagccacgacgcgccggacgaacacctttgcctcgccggcgacggagacgaagacgtaccccttgctcgaggccgtcggtgaggccggagtggccgcgccaccgcacgcgctggttgtacggcaggcggcccgaccgctgcgcctcgaagtagagcaggctcttcgacagcgcctcgccgtagtcgtgcgccgccgccgccgccgccatggccagcgacacggcgaccacggccgcggccaccacgaagcggccggagacgtcgctcatcctacgccgccgcccaaccacagcacatcgatcaaacagctcacacccctcacaaatatacaagaatccagaaatatcaccaccggatgatcaagctcaatcgatccagccaagatcgatcactaataactctcttcccaaaatcgaatcaatcaatgagcctgcatatgcatgcaggtgccagctgaccaccgcctgatctcccggaatggaaactgataactgaagattaatggcgccactaaacaacaatggctactgatttaatcacttccagctaaggcaaatgaacaagaacctccagctgccaatgaacaagaacaagaacactactgatcactgatgaacacacacagacacatatgctagttagctgcattcatgtatatatatgtatatatatgcatgtgtgtttgggtatatgtgagagggaggagagattaatggagaagaattgggcttcaaatcaagagaggaggggaggaagcaatcaaaatggggtaggaatataaggtgtgggtgccactgccatccatgtgtgtggaaagggaaggtgagttggtgaggttgagaaggtaggctttggtttggcttggcttggcatggcagtgtcttgagaagaggaggacagggacatgaatctactgggtctgcttggtactcccatatggtacaaactacaaagacaggcacaccacagtggagttgcattctgcattctctgcagtttggttgcaacaaggccacaaggctgatttggtggtgttgcaacaaagctatcctcatgttcctttcctaagctgagttttgttctggttggactggcccccacttcctatagctagcttgctccggtggtcagttttttggtaggtccagccctgctggtccacgggactccccgggcttggagcgtcgtccgatcgccgatcaatggtggagctttaaaagagaagaaattgggtttatatgtatgttcaatctagaaatgaattgtgtggattttggggcaggaacttcttgcagatttgtcccctgcaattcaaattatgctttaattttttctttcatttttttgtctcatgaaaaatccaaaatgttgaagccctacttgtgattgtgtgagaaataatttctgttgggttattccctctagaagagaattaaggtgcagggaaggaacttcaaggaagcaagtagggttctattagagcgcatgtcatggcaatatagttctctcaaggaaaaggtcagctaacgaatttctaggtgaaaactctcctagacccaattgcgaacaaaaaaaaaggagacctagctagcaaagaaaatatcaccacctacaaaattaaccaagggacagaaaattaaatccatgaaaagggataggttgaaatttgattcgcccattatataaaatacaattttttttacttgcatatatatatgtggctagctgttaatccaggttgagcaatcaattcgttggcatgttgctgtcaggaggtgttagcaagtaaacaccacacaagttgcaattgtttttgtgtgtgctgtgactgactgaccaaagtgtagcaggagaggaacaggagaggaggatgcgtcggttggaatccaaaaggaatgggaattcttaacataattatgctttgacgcatgagttggtagctagaggagatgaagcaggaaagaggcagtctctggacttggagttgcagaaagattaggtccacgtttacaacaagctcaatttagttcattaattactgtaactaactgttggtcaaaattgggccctgtttatgagggcacccgcaatggttatctatagtctcttataagagatccatgtcagcatattttcctacttggaagagattaaataaagagagagagcaaagctatttactaacctagagataatctatagagaaaaacgagacaatacatgagagagctatagatacccatgtagacatactattgaggtggtttactattaatctagtctattgttgagatgtacatgttttatagagagcaccttactttaccattgcggatgctctgagtaattaaattagacccactactaatcctagtgctactgtttgtgtcagcagctagctagcagcaccctgaagatactagttaagcttaagaaaaaggcttccttttttgcagtttagttctgaatgtagtaattgttattatttaataatgatcttgtcatatgtataagagtaaaaaaaatgctaatgtgtttagtatttgtgcctaatacgcagaaggagaaaaattacataccaatctccaattttaagcatatttctcccaattcccagatactacttaatctgtaccacctacccctctgtccaaaaaaaaaaatcaatcatacctacgaatctagatacacatgtgttcagattcgtagctaggaatttttttttttgggggcggagttgtatctcctaaaatagttgatttgtagcaattccaagacaaattagtacagagggaaaaggaccactgtgtcactggttgatataaaagtactattatcaggagggtaggttagtgatattgaagggataagattcatttaataataccttgatttatagacgaaaatagataaggaatcccaaatcaatattttgacaaattttgaatgcttagaaattaaattctctgtgttttaagcacagagagagtaggaataaatactgtctgataagagttgtttcatgtccttacgctacaacggattaagactctagagaaatattccattacaaataagccagctagctggtagttaatcaggtagatatcatgaacatattttcagactttaacatatgaattaatatcgctgccgtgtcaaatcaaaacctaagcaaacacagcttcaccaacacagcctaccgttagggagagattaaaacattccaagattccatcagacatacgtctacataatcaaacaaactgtcggtgcccagctatatattgcgtcacctgttcgtcatgacaggcagagcaacccttagttaattccatctatattcagagattcacttgatttcgcaggaaacagttcaattccggtagtaattaacatgagaggcaggatttttcatccatttttttttaaaaaataataacatgagaaatatgatatgaaaatgacaaagattcagtacgtagcaactaaacacatcagtaattacatgaaaacgtgtcaattgtcggcattaactagattacaatcagttgaagcaatgtactacaagttcaacgccgaaccttgacgacggatgggagcctgtgaacggatcaaagaatcatcactaccaggtcaaggtcccaaatatcatcttcaattcctctcccttttgtcagtctaaaagcaaaaatgattgattgaattccaagctagataggaaggtaagtagattgttagaaaaatagggatatatatctaggtacatgcatcatatgtttagttatttatacatggggccaaattaaaatgcaagtagtgagactgagaggtgatgtgctactacatgaaaattaaagcattaacttttttcatgtggattagtggatacattcatattcaaagcaagagcttgattgggttgttgcatagagatgagaacacaaattaggttgaacaattcatgacctttttcacaattgttaatttggttaattaagtatgagtaaaagattggcagtagctgcatcaggttaaatagtttatttgcatgtatatatctgcatgcactcgtagtttgactttgcttgtgatgaggaagagagaaaggtagaaaaaaaaaagaagttggtcgtctttgctgcctgaaaaggcctaacctttacctccccttctctttctgaactactaccggtcaccatccgaagaactaacaatgcactgtaagcctgtaataagcgtgcatgcattcgttgtgagacgtgtgaagtaattagagtatgattcgttctgaaaatttgaattctaaacatacttttaattattttgagttaatttttcaacatttaaagttttatccaccaattatatagttacgcttataatcagttctaggtgaaatgatggagatagactgtttcacgaatgccactgcaaatttacttgtagtaaatgacttcatttggcttcacgcttttcgtttcctgcgttgattgatttcttcagccaactgaacccagttcgacaccagatgaatatgaggctcagttcgtttgtgatgattcccaacctctccttctcgatttccgcgcgcacgtttttcaaactactattttgatgcgttttttgtaaaaagtttttatacgaaagttgtttaaaaaatcatattgtttcatttttgaaaaaaaaattagctaatacttaattaatcacgcgctaatggatcgttccgtttttcgtgccagagccaaacgttcccaacctgctctttcgaacagagccggcttgttgtcagcaacgtattaacaagtaacaactatagttgctacttcctccgtttcacagtgtaggactttctacaattgtccatatttatttagatgctaatgaatctagacatatatatgtgtttagattcattaacatctatatgtatatagataatgttagaaagtcatacattgtgaaacggagggagactgctactagctaggtactccctccgtcccaaaaaaaaaacaaacactaggtttccgtgtataacgtttgactgtccgtcttatataattttttttataattagtatttttattgttgttagataataaaacatgattaatactttatatgtgacttgtctttttaatttttttcataatttttaaataagacggacggttaaacgttggatacgaaaaaccatagtttattttttttttggacgaagggagtaagcaccaggatttgagggtcagatgtcagtatgtgttactgcgatctgctatgatttcacactgtggcagattgtatgctactcttttggtttggattagggtttttttttttgaaaacttgatttggattagctagtatgattctcgattagtctgaggccctatttaatttggattattgagagagaatcatcctcgtggattatctacctaagataaattaaactacatacaatttgaccaaattattgtaaaactatagatttaagacgttgtatcataaaatttaaatttaggccgagtttagttccaaactttttctctaaactttcaactttttcatcacatcaaaactttcctacacacacaaacttccaacttttccgtcacatcgttccaatttcaaccaaagttctaattttagcgtgaactaaatacacccttagtgactaatttattatgaacctataaatttaaggtcaagtatcacaaaactaaaaattctatagttaaatccctagtattacgttatgttggagctataaatgttatagttttatgattaaattatcactaaatttgtagttttctgatatttttttttgatactccatcttttatatatatatatatatatatatatatatatatgtgtgtgtgtgtgtgtgtgtgtgtgtagttttgtgagaaatttcacgttaaatataactaatatatagttatatgatataacaccttaaatctatagttttgtgaaatttactctaaactaaatagtagatagacttaacaaatacttaaaacaagtgatataaacaatgcaatagaaggatttttttagaaaacgtatatattagaaagtttctaaaaggaaatatctgataaaaaaattgctacagttgtagatttgtgatattgatttactttaatactccggatgatcaagcacaagtcggaatgttacagcatcgctcacaacgtcctctgccatagatacctacctatgttgaggcagataattaattaacaaacaattatttcgttggtgaagatgagttatctggagtatttaataagtgaaattgtgctattccttggaatactctctgtcttttcaaacaggaaattggatcctatacctcccttgggaagatgtatagatgctccctctttagttcattggcaaaaaagaagtgattatcgttttgttcatttggcccttctctagactataatgaatactcacgagtatcattcattgcattgccattgttgggaactcttgtctgaagttttggtatctgagatatgtatgtatgtagagattcttatggtattttgacatctctgattatgtatgtcttggcaggtgtggtttggaggactccatcctttggaagttctcaagcaatggacagttttctgtagcctcggtttatgagttttctccaccccgtaacgccaaaaatattttcggtaattggcttagaggggtatctaggtccattaagaagatgattctaattggagctagcgctgtatgttggtcaatttggcgttgtcgcaatgataaagtttttaatggtaaacaattatctaaccctatgcaggttatcttcatgtcttcctactggctccacttctggtctacaatgctaccacaggaggagcatgatactatgcgcaatggtgctacactcttggaatcggtagccaagggtctcttattccactatgggtggcgtagttccataagaattgctagctaaaatattttatgtggtttaacgctagtcaataataaaggggggttggggatttgtcccatcaccttatttctcattctgatttacttttatcttacctttttattactattaaacttattgctgtgtgtcttatgacagaagccggagatgtaatccatttccattatctaaaaaaaatgagtttgatggttaagggtcgctgcctcacggccgacaaccttgctaagcgcggctggccgcatgaccttggttgccctctgtgctcatatgagcaagaagactgtgatcatctcttcccaaagtgctcttttaccaatagggtttggtccttgctgagggattggctcaatgtgaattttatctccccccccccaaaggacgacaaggccttccccgccggagtggtggcaactggcgagacgctgttttcagacatgctacatgagtgcttttgacaccttatttatgttggtgagttggctaatttggatggaacgcaatgccagagtttttgaccaaaggagcaagatggccgagcaccttgtggcagatatcaaagaggaagttgcagtttggagagctgcggggtgcgtttcagtgttgtgatgagtagccctagcaatcccggtcttttctctctatctctctctctctcttttacttccatcccgatttctactctccgggggtgttggcccccggctcaatagtttaatgtcgtgtaaaaatctgtaactttccccctttcaatcttaatgaaatttggtcggcccctttgccgactcggcaaaaagatgtggtgcggcaatttcctagttcatctgcatttttttaatcatggatggagttctctgcacatacatacatataggcctcatcattattgttgggtttagtcccacatcagtaattgatgatgggggagcacgacttaaaaaggtgggggcgatcctcacccatcatactagtcttttgagttgtgtaggcccaggatctaaaattgtggctctggttgggcttgtggtggagcaggcccaatgtgacctggggtggcccacggtagatggcccgggctgcgcactttaacaattattagtccacacaaaagatctataattatggcagaaacaacttaacaactttatcaggcctcagaagcagagttccacacaaaaaacaacttaacaactttatcagtcctcattcggttttttctcttttaagtgggcagagtttatattaatagtgttcacatatgtagagttaaaattatcttcactcgttgcaacacgcatgtattttgtgctagtagttctttttttttaaaaaaaaaagtatgtctatattagggatttctgatactcaaatttactttacattttttcttttggcagaggataaaaaggtcggcccaacaagcatggacctttcttagtaggctaaaaatcgcctatgcgctaggcccatctccatataagggctaggttttgggccatgatcttcttttttctttaattattttccgcgaaacaacaataaataaacagaacaagggagggggaaaaaaaaagagaagggaaggaaaccctcgccaccacgcgtctccgcctccggcggcggcggcgccgcccgccgctgtaccaagatcccgcagccactgcgccgccggccgccgcgctcgtcgcccacgcactagtccctcccggagtcgtaggctgcgggttacgccccccgccccgccgcccggccgctctctccgggtggggtggtgggtggcaaggggctgcgccgccatcccatcaccaaccaagcaagccggccggggaacggggagcaaccatgtcgctcctacgacgggtggggaggaggttcctcgccggcgacatcctgtcgtcggaggcttcgccgcatgccgtcggccgcctcttcaccggtatcgtatctcatcttgccgccccatctgaggcttctccactaccaccactgcaggcattaattggcatcttgtcggcctcatcagagcctccgctaccgtcaccgctggagggtgtcaggagcccctcaccgctgccactgcctcgggctaccaagcaaccattcattggcatcttctcgccattcaagagttacccattgcaggtcataagggagtcactgccgctggtgggtcactcctcttcactcaacatgatcttcgctctcaacatgatatatcgtatgaacatcgcacttgtaacgtactatttgttttttgtcgcaggcccatcatcagtcacttagccgcaacgccatcggacctagctacaggtggccatggacgcggcttacatctgcagtagcactgccgaaactccttggcactaggtgggcatcaacaaatacctcctcaactactgggtaagtaacattgagctcacactctgcacaattgacataccgacacgttgtttaattcacaaatgagaagcacacaaacacaaaaatttcccccagcgctgcacaccggcactaatgggaccttttattccccacacttgctaaacaactaatccttgcatgcaaagctcacggccactagcacatatctgcatgcaagtctcgaataacacatgtgcaagctagttgatccactcttcatgtcacgactcacttcacttgacttggccgctcctccaagcaaatactcacccgctgctgcatgtagtcacttacatacaactcatggctttcaccgatcacactaactcgcacatgttctcgctgatttgctccctcacacacatgcacacgacttactataactcaaactaaaagatcgcttaaacaacaagattagcaatgcacctaacatgtagaattgccagttagcagcaggagattagatagaaaacatgtaaaaacacattttgaaatgaattaaattatagctgtgctcaatacaaaatgtagaaactgaaagactgaggtgtcaattacaagttgccagcttccacatggaagaacccggatgttgaaatcactacaacgctaatgctgatgcaaagaatcttccctgttaaaactatgatgaatataaagagctatatccctgataaatggacagggccggctctacaattttgagggccctagggcaaacttgacaacatgacccttaacgctctctctcctatagagtgacgtgttatatgtatattcatattttttggttgttcagattaatgccattttaaaccatatcaatttttgataaagttgttaaagatgtgtatccatttagtttttttaccaaactttagtaaatacataagaaatcctgctaaaactagacaatattactaaattgtaaagattttggtattgccaaaatttggtaagatttattttggctacaatatgaacagccccttcattttcaaagtgtgttttcaaatctaatcatagagagaaatgaacattgataacatttcatatatatgtttttttagaaatagaaaaatatcaacacttaaactgatcttgtttatttttcccatttacttagcaccataaaaatgcttcttgagtaaaattacaacttatcagcacctaaaattataaaggaaatatatattaccaacaagaatctatctttacatacaattttgattgttgaatctagaatctttattactccctccgtttcacaatataagtcattctagcattttccacattcatattgatgttaatgaatctagacatatatgtgtgcctagattcattaacatctatatgaatgtgggtaatgctagaatgacttacattgtgaaacggaggaagtaattcactaatcagtattatgtagatactagtagataaccaggagtggtagatagtatgtaattattcactaatcttaaagtactactttggctcatacagtactcatacaattttaagcatggggacgggccctaggccgtcaccctctttgccctgccccagagccgggcctgtaaatggaaatgcaatagtgtcacctagattcactatacagtctatagatgaactctaagaaggtgaatatatttatggttatgaccgaaaagaacaagcttgatagttggacgcaaaattttacactcgaagagaggaaaaaagagaaattaaaccctaattcagtttctggccgctagcaaaccggatgccacacggctggatgtcagcattcttacactgatcaccatgaagctgaatgacctacaaccatttaattatgttatcaacatatccgtgaagcagaaattgagaactagataagcattgccaagtgcatcatacctggccaagctctggatcttggagtacagtaccattgcagcagaattcctttttcagatcattgaggatcttgttgtaactgaactcctagccctgaactcatcatagattttgttgagatgtgctttgccaagactactgttttacaataatatttagtatttttttaatctttgtttcatattgtggttttcttataggtttggtccatgttttactagtgcgggagagttgattgatgcccttacctatgcaagagccaaccctcttatgagaaaggttaagatcatgggtagagaagataaaatcatatggattccaaatgacaatctcaggagactcgtgagatcattaaacaagacctatgccttacttcatgcaaagaagaagtgtctgtcctcattaacttcttcaaatgtcttagtgggtgaggatggaagtgcagtaattcagggtgttatagagattccttacagtgaggaagaagcttgttgtcgatacaatgaaactgcttccattctgaaagagctgattacagagtctgtggggtctgaagctattggtgtggattgtattgccgattttcgccgtctactccgccagatggagagcatgacatcggtttgtcaggagtacatcatcagcaaccacgcttcgcttatacctgatgctaacaggtattctactgcataatttgtatttattttgtgtgatttaattgtttttttttattactgatgtggttggtataatgtttaatataggacggcggtatttctattattttacaatcacatcatgggtaagctcgcccaggagcaaccaagactgaagaatcagattattagcaagttgccgtatgatgggatttggctaggcatagttatttccaaccgctttctcagaagatggttgaatagccatagggaatacgtgagtaccggggatgatgacatgagctttaactggaatgtccgctctcatttttacgtacatctgtggatctttgcttatagtcaattggaggtagaggaatgcttatatggtgagtttccagagcttctgttggagattgagatcctgctatggaaagcgaatgagatcgatgggctaggattcgaggataagttttagtggctttgagatatggcaatgcattgtaatatgggtgaattgtctgtatgacgtttaatctgagatcatggatctcttgttagggctttaggtggtgtttggatccagggacttaactttagtctctgtatttagacactaatttagtctattaaatatagactacttacaaaactaattacataaatgaaagctaatttgcgagataaattttttaagcctaattaatctatatttagagaatgtttactgtagcatcacataggctaatcatggattaattaggctcaatagattcgtctggattaattaggcttaatagattcgtcttgtgaattagtccaagattatggatgtgttatattaatagtctacgtttaatatttgtaattaatatccaaacatccgatgtgataaggacttaaaagttttagtcccatctaaatagggtcttagttactcttatctcttgttaggtctcttgctggcaataattttgtattaattattttctcatattgttatggatattactatttggaaaacatggtcacattgtcatgcacatgaagagggtcattgcttagatcttttatgtggctttcgtatcggggaaaattaaggggcgcagatggagatggtgtgggccgtcgacggtggagaatacaagtcaagactcaagaacgacccgtgatccgttctccatgggttgctctcctgtgaagctcgtgagattctaagacggaggaggacgaacaagttttactcatagcggcggcggtgataagctggagaaaaggaggaggaggagatggaggggtgtcgaggagatgggccgtgctgctctgcctcgggagcgggagcttctgcctcggcttgctcttcaccgacaggtaaccaatcaatctcctgctcttcagttcttgctttctccaactcgaggcttggagctcagctttggaggtgtgctggttgatttgtgctgcggctagctcaagatctgtggcatttgacgggcctcatgcatttgggggtctggattactgtgtgctcatggattcgtgttatgattttgggggtaaaatactgaaatcagtgccgctgttcttgctttcatgagggcatttggtgatttggttgcttcgattacatcgaattggagtgtctatgctctctaaacctcgaatttattattgggtaccgcattagattattggcttcgcaagctgggccttgtgcaaatgatcctgtgtgaaatatgcacataatttgcttccctagaggagtttctgctaactggtgtatcttcagttcctcatccaacattttagctttaccattcaactctccagtcactttcttcttcagaaatataaaaatgtcaaagaacagaaagcactttcttcttcagaaatataaaaatgtcaaagaacagaaagcatgtaaaacaacgatgctcaggaactgttaaatgattatttgctaatatggaacaaaaattatcatataattataccattatatctactgtcacgaagagtacattctttaacgccagtttagcagcaaagacttcgccccgagtgcgtcttaactcagtagaacaactgattatttttactatatcccattagtttaactgatttttgtctgtcgagtgcgttataactcagttataactcgagcctttcctatataatatcagtttataggcaatatggcctgagttgcagcatgctactctcatctccatattagcaataacacacttcgggtgcgtctttaactcggtagtacacatgatgaaataaatatgctataacaactgagcttaacaacacacttcaacttaattaagctcagttttatatagtaaagaacagaagcatatatgacgtgcctcaagtgcgtccacttcaacttgtatggctctctcatcgaatgcgtgtgtgtgatacagtgaagtaatttttttttaatttcttctgctgcgcaatctctgcaggtgttcgggttgcacgcatgaggtggatctggacaagccgccggtgctgcaggaggtggagaatttctttatgggtcactgagttggagatttcaccttcagcaaaggcagactggtacatgtagcttctaatttgtgccgtttggtttgtgtagttacattgtgccgaaattagtttaaagggtgatgaattcatgatatctcagcttcagtttggtaattagcttagccgttttggagtaatgttgtcgtgcatggttttgttcagtttgggagtaggtttggctaacacaaactgctgctggtgttttgaggacatcaagcaatgtgtccaccaggaaattttatcatccaaatgtagccagctagctgaatttctcattcaattgtgcagagatagatcgggatgtccatgttctcaaatatgatgggcggttgtctggaccatgactcaatcatcacgaccaacatttttgtggcgctgcaatgcatctgcattgcgattgggcatctactggaaaagaactggtaggtcaatgaatccattacagtgcttgtgttgcagggatagttctctcgcgctgcactccaggtgtttgtagttttgccttaaggaagagtagtttcagttctgctccatggcttgcaggggttgatcactagaggtgtgattcatgcttgtcagtgctggtaagaaaattcacacattcctgtcatcctgtgtttagtgaggacttcttcatctattacttccactgatcagtcttcaattttgggcaagctttctatgtactgattgttcgtgtagttagcttccaaccaaagtgaaatttgttctgtacgtgacaatgtgacatgtcttagtttaatttggttttggctaatttaatcttgacaacaaaatgcactgtagtaggaatcacttgagaaattcattatttcataagtacacatgatgaaattattttttacagttctgtataagatgttttttatatctctgaatttatcaaagccacatttttagaactttctcaaacccatgtaatttctgaatgtgaaggtgcacttattgaaatggatggattagtcaactaccctcccgttcctataaaactatactgaaaaatagattaaacaatcatgactgccctgtcccaaacaaatgtttttttccctaaaatacagacttaaaaggattgtatcacagtactatctggagctcttttacatttagaggacttaggtgctgagtgccaagtactggatgtgagtaagcttgatcatttagattatttagagaatcaacatccttactcctacaggaactgaattgcctaatgtaaatttctaggatgttcgtgtagttagctcccaaccaaagtggaatttggtttttgttcgtgtacttcaacaatgtgaatttttttcctgcagtaaccttggtttttgttcctgcagtaactgaatttccaggatgtgaattttcaggatgttcatgtagttagctcccaaccaaagtgaaatttgctttttgttctgtacttcaacaatgtcacatgtcttagtttaatttagttttggctaatttaatcttgaaaacaaaatgcactgtagtaggaatcacttgagaaattcatttatttcataaatacacatgatgaatttttttttaagttctgttattggttgccctgtcgatctattgagttcacaaggatctttgcttgggtgagtataaattttgaattctatcctcttcgtctgtttctcttctcttgctcgatttgctttgctgttggtgcctctttgtgactgtactgtacctgctacttttttttgttaatcttgtcatggatctcggaaaggttacctgatttcgcatagattttgtggcttaagaagtaacaatcattgttaaaataagtgagatttgaaataataattatttcctaataagtgagatattagataatatgctggtaaattatttcatatattattactcctaataagtgatattgttaattttttctcactcttcgcattagctacgtacaagcattataacaaacatctcacttactagaacaataatttaacattatctctcatcgttctgccatatttgcttacttagtccttcgctttctttaaatgattaataatgttttcttctgcatgccaggctgtggtccagtatatgaatgatttgaatgctgtaagaggaacaaaccagaagaaaacagatcggggaagcttctggaccttgctcttctcactgtttggttgttgcaaaaaggaccaagaactgggattgccagtataactcaagcatttcatctgtatgcatgttgtgaattactcaggtctgcaaagaaaggaaacgtgggtaatttggttcctcttctttttttggcttccttttttttgtgtatatatgtaattttgtcatgaacctgttcccgctgcttcccgaggcgttcaagggcaataagcaaatcggagtgatcggatggggctctcaggttcgaaaaaaataaacgctttctttcttgttttcagacttattttcccgtttcatttagatggctagtgtcgcacatgtgacatttccaatcactaattgatcaattgcgcagcaaattgcttcaataacgaacaaattgatgtgaccaatgtggtgaatgggttgtcaattgattttttacatggatttctcatgctactcgggttcaggacaagaaaaccacctgtattgtgcataacagagttgccattgctttttcaggggcctgcacaagcccagaatctgagggattcaatagctcaagtgaagtcagacattgttgttaaggtactcttatcttgtactgtattttcagttttgattcataggacatttttttgcagtactttggtatgcaagtcgccctgttaactgaaagctctgaaccatggtttgaagcctcgattgaactcctaatattcgttctcctttgtatatggctagcttgttaaggtgcacaggctataacttattatccattattattttgaaaaataactcgagttatacaatttgtcaatgtggacatcataattcataagccattatattttatgctcctcacttatgcaattttgcattgttctgttagtccagcattctattatgccctttcctttcagattggtctccggaaaggctccaagtcatttgatgaagcacgtgctgctggtttttctgaagagagtggaaccttgggagatatttgggagactgtttctggcagtgacctcgtgttgctgttgatatcagacgctgcataggttaacttcaggctctagctgcatgattttagttgccacttgatgttgttacctttaccaatgcttgtttgaattgtgctgaatttcatggttctgttgtttcatggtcttgtttattaaattgaatctccaatgccacatgccatctgccgtcacacagtcactccttttatcccttgtagatgcagcaaagcccacactcaaagagagatagttggtgatgaatcaggagctgagcttggcggtggagcgcgatgctttgctccaggaggactccatcgtttttgcgctcatcaagcagcggcctacactcccgccgccgaagctgccagtggccggtcccttgtggaaatggtaattctatcatttaccggtttcttcttctgttcaattgtagatagatccattggatttgatcctaatcaagttctatttttgaactgttgcagttctttcacatgaaaaaacttgtggttatcaaagctctggacatctacagaagaacaaggaatctggtatgtataatcatcatgtacctttattttgtttttattattacctagagttacatgcatttttttccttctgaacgaaggcattgggagaactggagaactaaatgatctctagaacataagacaaaaggcttatctgatttctacaatctatcagttttaaactcagtaggaacttcctattcccagttctaagagaggcaatcatctttaccttatcctgtaactgtttacttttcaccgctgacaatttagatgccacataaacacatacatttctatctattgttaacttgaaagactaggctgatccataatatttcttatattattaattagtaacctggagctgttgtcatagataatggaggagaatggcttattgttgtaaacatctttgtggctgtttgaaattatcatgtatcttttccttctttctcactaaccttatctcttctcctcctctcctccatacatgaaccagccactgcagtgaaaccaacgggcgaacgtgttgaccaccgaagtcgccatcatgtgatttccaccaagatcgccataagccggtcttcgcccaataacgttgctgtaaaaccccaggtaagttcctactgcttgccctaatatcttttgctttcgatcattgatccctgtccacactcttctgggcttgggatttgatctctatgtatgtgatgatttgaatgaggggattcgactaggaaagtaccgtgtgaaggatttatatgatattagtggcgtttgacctgattagattcaatctggcttttttttatcaaccctaggtttgatctgttaggctgaagattttgagaacaaattataatgggcggttagtttcaatggtactagaaatttcacctaggttttgtgtatggatgataactcaaacttccctaactgttgtaattcattcatgtattattctttaaggtgttactgtggtcaagtttttttttaaaaaaaactaatttgcgtttaggctagaattagcaaggcttttgtttgaagagttctaatgaagcataattttaattggaaaataagcaggatagaaactagattgaaactttttttttctgtttattatggttgtttaaatggcattctcatttttaccattctactgcctccaaaccccagttgcaagaacaaaattcaaatgataaaaatgaaatattgagattaagagcactatattctctctaaaaatagatgcaattcttctgagtccatgtgatgcaccttttggagtgattaggatttatcagttatacacctaattaaataatctctcaaaacgtgtatgattaatgcaacgagttcaataatttatcttgatgcctaatctaatcctttactcaattatcttgcaggcaatcttgatcaattaattttagagaaagagagagagagagagagagagagagagagagagagagagagagagaggaacgtctatgatcaattgctccagtttagagagttttttcactacaggaaggtgagatgaccaccaccagctgaaactgcactgtgtaggcccttgcttgagaagtaatggccatgacttgaacctttgttcgtctggaacagcaacacttcagtatgcaaaaacctcttggaagtggccatatacattttgtaaaatatccatcaattactattatccctttcatccatcagaattgtgttacttgccgtgtacggtttaacagagcactctaccaccaaattttgttgtaaacatggtatctaaaaactgcttgagcgatccagctatttagcactccgaaaatctaccactacgttatgtcagacaatttttttttcttatttacgttctaagcttctagcaacaacacggaataggaatcgactaaacaataaccccatcagctagtatgtcattaagcctttccttgtttgatctgctgataacatgagcaaatttgtggcatattgacccgctttaatatatcatcaatcaataactcccctaaccccatcgtttttctcatttttttaattatttttgggctatctcgttgttttacacgtggctgctaacttctcctactcgttgcgcgcgcgggggcaaccgtccataagaggtgcgccggttaattaaaactagaggatggggcgcgccactggcgcgccgcctgaagagagctgtggtgtaatacggtattgttattttggatagcagattgtaattaggaagagttcataagtagatgccacaaagaaagtagtatacgtacatagcagcagataacatcatcagcataggttaactcacttgagtctgaattaccagatgagcaatacatgtatttagtaagttacaaaccaacaaaaaccgccaataaaaaaagattacattcatttccaagcaaagcaaatctcaggaaacacttcaggcgaggcaccaaaactctccaggaactactccaatccaagcatgcaaccttgcctaacaaagaactttatgaatcccagattatttgtaataacagatctacaacagggtacaaccattccatcagagccaggagacaagatccaaagaacaattggcacagcgtgttaatcccgctaatgaagagcagcaacagcgcctggatcacccgacccttttccccctgatatcaagacaacaaaatataagccatgttcatcaattctgacatgcaaaggcatcacaaaatgatagtagtaacacactaaatgtcctcttgacatattcaaatgtacatgccaacaaacggaatgaaccaaagctaatatagcgaaatagtacttttcaggttatttttggggagtaatcaccgagtgcagataaagagtagggaaaaatgtaggaaatacactttttaatgcaacacatcaagaccattttgctcgtgatgcaaatcaaatcgaaaatcacatctgtttaatacataaacctactcctatggtaaaaaacttcctaaacatcagaatatcaataaatataaaaacatataatcaaatatgcaaccatctagcaacaggatttagcaatgggatgcacagttactcatgaagccatgaggatgcaacaatcttaatacacaggtaaatctaggctgcacacaacctcataaggacatgcttcattgcggggatggccagccagtataatggaaactctcagtgtaacaacggcgtacgatccttgcatcagagccagaagacaaggcccgaagaccagttggcacagtgtttattccgacaatgaacagcagcacctgaatcacccgagccttctacccctgatacgaagacaacgaaatgcaggccaagttaatcaattttgagatgcatagcaatcacaaaattatagcagcaacaaatttgatctcctctgacatcatcaaatgcacatgccaacaagcgaaatcaaccaagactcagataacggaatagagcactttttcaggcgatttttcggcacagtataaagaggaggacaaacagtacgcaatacacttttcatgcatcacatcagggcgatttcgacataatgcaaatgaaatccaaaatcacacctggctgatcacataaactacattctttccaggaaagcagaatgaaactcatgagcatgtaaaaatcctaatgcacaggtagagctagcttggacacgactctagagggattgaattgtgatccatgaacaagtagggataaaagatgaacatttgaggtcaacaagggcaaggagtcaaaggattagggaggattatgttagaattaccttatttaggtcatattactataaagttcttgagaaaaaaatgtttatcaatcatctataatgaggtggatagagctatgtcaactgcagaattatgttaaacaccacagcacaccaatttcaggataatagcgagacattataggaattgataaacataaattgatgttggtacacaattaataaggctaatgggatatctttattatatgaggctataataatcctcttaaatctttgtaatcctagcgtaaactgcgttgatgcttttggttcagctaataccggttaccagagtaacatattgagcctgcattacaatcattgttgcttggaaaatatattaagctaagattgagaatagcacaatagggtgcttcactggaatgatcaatttatattttgatttcacgaaatagtaaaaacaaaaatactcctacaacacatttaacctgtccaaccaaaatagtgcattcagaaaccatgttttgcagagcaatagagcatcataattcaccaaatatactaaacatttcaagattagcacaacaacaactaatttcaaggcttgaaggatgttctctgtaaaataaaaaaaaacacctttttctgcaaggaataaagtaaaccatatatgtgtgaggctatgacagacctgttcagcaacaaatagtttggataaatgaactgaatttatttggtggcatgaagttgacagttaatatttcgagtattgctgaatgaaaaatgcctttagttgatcactctgtctaattctgacatcaattaacccaaaccaaaatatcaaagttattgcaaataaggacaaataacatttagccctgcttttgttgatctaagtctctaacagcgtacaaatcacaagtggtaaatcgattaattcaatgtaaggagaaccattttaagttaagcttgaaaggaagagaaaattttacaggtgcataacatggagaacaacaggtcaatgatccaaccaaattcgagcaggttttatacattttgaagtcagcggaagtgcatagtccagaacatagataactcaccttttacttgagttgccaagagctcaacagtacagcctcatccttgcccttcagcttctttgctgttaccatcctacaacaatggtatatgtcatgagcatttgctgaacattccctcagcatttcaaaacaaggctgttgaaaaggaaagaaagttgaatacttaataacatcaagataaatctttaaagtattccctaaaatctaaacaaaaaaagtatttgtaccataactaatgtacatagtctccggagcatgacgctgataatgagttatatgaacaaactaatgttcaggaacaaagacaagggaaacaatatattaatgaagcgctgctacacatttgtgctatttcataaccatatatgtacatggcactgattgcatgagaaactacaaaactaagtatgacagatctttcttaatatccatagccatgataccaagtaaaactttttcataatacttttgtataaacacaagtaggtcatattaattaagcacagagaaaagttttgccagaattctatatagaaactattaagcaaggagtcaccaaatggaaatcaatcattacgagaggatgtataataagccaaccatggatcaataaaaaacaaatcagtggaataataagatgtgccggctcaaagaaaaaagcacttgtacctaaagagcttgccgcagcatttggatcaggagtcttcagcattttcatacatttgttgatcctatctctttacctgctaactgccacatccaatttattactaatctccccacattttcccttctatgtttctttgtcttgtgtctccaaaatcttgccagtttccttacatttgtgcctctcaaatgacacctcaaccccacatttgcctctcttttaactcccacatttgcctctctttaactctttgccatttgtcaagtccaagttcatgccaatatcttcaaatttgtctcacgagtcggtattgccaatcttaacattacctgtttgattatagtatctgtgcagctctccgaaaacaccccaaaagtaaaacttattacattttcctgttaaattggtaattatacaaaaaaggttagatgataaatttgtacatgcatactactttttaaaatatttaacagggactgtatagctatgcacatgcaaactccatgtgatttcatctggttgtaagagaaactattgcgacaaatcaaaaacaggtattacaaaaaaaattgaatttaaaaaatattcatacaaataagattaccaaatagcaactttgagaaatggatgcatcacagtatcagtttgtttaagcataccaagtccaagcattgtcagttatggggggatacatgacatggtttggaaatgggacataaaaaggatcatggaacatattttggtattcttgggtaagcaatttggatgaaaatatcagcacctagtagcaccagccttggttcgtaacccaatatgcaaagaaatatttttcaggagatggtcagaactcccgtttggtctgcaaagaaaaagagagaaaacacacaaatgcagataagcttcatgcacacagctgcatcctgtagttgataaaaagagtttaaactccaaaagaactcgcattcattttttcaggataaattgttgaattggttttcaattgccggtaactgaaatgaatactccccccgtcccaaaatatagtaatttctagcattcgtaatccatcccaaaatatagcaaatttaccacctacattctctcaaccaatcaaaaccttctctgtttaatttctccccctacctccttttctcaacaaatcataacattgacccatttaattccacctacttccttaatactcgtgtttaaccccaaaacttcttatattctgggacggaggtaggacttgttagtatatgacaaatgatatgactgaacccactaaaatcattggtgatacttctgaggattaatttctatcatgccaccaattaaacatctgaaaacgtccttattttataaataatgagatgggtccacaccagtaggtccacatgccattgagacaagtgagaggaacaaaaggaaagtcagtagaagcatcgatttgaagggtcatacctttgaagagaactaatgaagcacagtccaatatcttgtccttctggaggtttcatcttgaatgtttttggccacagatgagaaagagatctagcctgcagctttaatatttcggccattagttttgaaggttcatatacttgggcagaaatttcgaaagggaaatgggcttcaagtccatcacaaatatgtgttagctccagtcacttcaaatttacccctaaagaacagttgctactatataaatggaaaggattgtttgtactacccgtggagatcaagttatctaaaaaacatctttgtatgtatataagcattagtatgacactttgtcgttgtgcagttaattatatgacacctcaactataatatgcacagtcagcaaaggctttgatccacctatctagatatttgcttttaatctggaagtagtgtgtcaaagaaatagtggaacccttacgcaaaggtgtcatagcctttaaatcattaactatgttgattgtatagatgatcttacaagccataaacttgagattttaaacgtactatatagaactactaaatccatacagttgtagaaaatccaacaagcgatgaattattgtatggaaggacatgggttgaataaatgtaattaacttgagaatcccatgcaaaaaggaaccgaacacatttaatttgtctaaaacactaaattatatgaaggactgaattagacagattcatttatataaactcgcatttaaccggaataagggccataataaataaactcaacttgaaacaatgggagcgtaaaattaacaaatctgtagttcagtgacctaatgaccaggaatactcacctcttgatctgtgaaaagcccaatagtacagccttatacttccgctttggcttcttgcatttaccatcctactgcaatggtagaagggggaacactcacaacaatagtaaagcatatatactgcctttcatagtagtcaatgctacctctaataaatcaattttctggtgaatacattcagataacaagtgcatcccctaaagtaaaagaaggaatggaggacaagatatttaatcaaaacaaatcagcaacacaaaaaaaattttcacacttacataattattttataataatttaatagttaattaaaataaataagcaaaatcttatcagagctgatggggagaccaagattaactaaagaattcccagaggataatttagtatgttgtggcagtacatgcaccgatgatcttgcataatacaggtaagctagtgatgtcattttattaagtatgcgcttgtttgcagtgacctgatcgccacccaaaaaaaaaatcaaaaggtgttaagaatatttaatatatcactgcttaattttttgtcaaatatctgatcattgcttagtaacataacataggataatggcacgaatgttttactgatcatattcctcatgtagagctcccaaaatagatatttttgagttgtgtacagaccctcaagctaaagtacaatctgcagatataattgtgccgtaacgccgcttgttgcaactaaatggacacccacttgattggaagtagtcagtgcctatcaacaaagataatgcaggcattaggtgaatttacagatctgactgccaagggcaaaatgtgcagataaatgaacttaacacattagcagtatttaaaagaatattgatctacaattttcattactgatgaaggggaaaaggggggtgtatagaacaatatatttaagtggatctgaaactactacctttcacatagaggtaccaaagatgtgaccaagaagcagcttcattcagtaacagctgtgctttttgtacataagctatcctccaccggcgaaggtttcttgtcccagcagacctgaatattggatggcgttgaccagtcccagataccaaagattaggcatcagagctatgataaaaatattcatctccgaaactttcagaatttagacaccaagtatattttttagataatggaagcttcattgaactgatcattaaattacatcgagatgatacaactgtcctaagaacaattctgacctctgcataattgagatgcatacagccaagacaccaaatatttggacataatattttagcagtccaaaggataagattccttcacatatatataatcaaaaagtccatgatcgataagacataatgatgctatgtacgaattgattaccactgttgttagacttctgtccatgcaaaatgcaggatcatcctaagatattatctgaaaaagatgagctctgctgatatatgacgagctccaaaacttctaaatgaactcaacaaaacaaaattagtttagtttagtattttcagatttacccaaacaaatagttaagcaaaggcactatcctgtcatagtattcatattagcaaatagtttgaaaacagatgtaacaatgatgtaacagactcagcaatttgtaggacataatcatataaacatagattagtttggtaacaaagatagtaagtttcaaactttaggaagtgtgcaccacgacagttcagctacaaataaaagataaacagataaaaaatgttcatgtcgcctaagccaattgcatgattagattctgaactaaaatctcctcaaactgaaattccaagtcagcaactcataagattaatcaaatcaggtcgtatctggaccaagtagtaaccagatttcctcttggtcttgcctgcagttaagtcaggctagctaacaatattttcaggtccatttggcacagacgacattgcaccccatcagcatgtgtcaaatagcacaatattttacctccctggaagtatcaccaccaaaatccatctttgtggatcaggccatcgtcgatgatggagctgctgatcttctactccaactccaataccataaagttagtgacttgccctgaaaaagaaataaatctagaagatataaaacatatttagaataaaaggatgctaaaatttttaccagaaagagctgacttcctaggtacaaatgtagtagtacaattttattacttgcaagctgaatactccttaacctcacaatcagaataaataatcaatgccaatatattttgttcctctgaattatgatcagtatgtggataaatgtattacccggtaataatccgcacatatttactaacccacccgtcatgattagtgaaacatctagcaactgatttcacaatagattactaaaaaaggggatattcctgtacagtttcatcaagccactgaattatcttacttttgtcccaagataacatacatggcatcatctactaaccacttatagtacaagtgccggacaaaattgaatgtctaggtttcggtataaacaaataaaatggctaggtttaagaggtatagaaggataagcagtcaggaaatgaagacattacaccataatggagtgtttcttaagcattgtattactacctaatagtttgttctagagtgaaaaaactgttgttagtatcatctaaaacttttatctggaaatcatcaatcaagcagaaagcaaaggaaaaggcacaaaaatacttcatcacatgagcacgtattagctaagaactgcattgatttataaagtgagtacataatatatcccttaagacattagcttaatgacttgttacggtcttatttgtaataggagcagttctaggggcttctctgatgtacatttccactgttacaagaataaagatggcggatgagaaagtacataaaagatccatgtggaatcagaattatcggtggtcaaacgaaaaaattacagggtaaggtaaagataattgtctatcttagaaatggaaattggatgtttctggtgagttccaaatccttatagagatcatacaaatcagattagaccttttctctgatattctaaagatcagtagttctccgtatacacttctattcagggggcgggggcgaagcaaaaaggaaaatgcatgcaactctatagaagaaaaaagaaaatgaacccacacaatgattatgcatacctggttcttctgtacttaacatcaagcttttttcatgtcaaagaactacattagttcaaaaatatgatttgatcaagatcaaatatagtagatcaatcaatgattcagcaaaagagaaaactggtaaatgatatatttttaccatatccacgcaatttatgatgccatcattgactgcacaaatcttgaaactttccatcaatgcctgagtaagagtaatcccattatattgccattcatcatgaacaagagcaatcagataaatggttctaaccaacaccactcaaaattcagaacttacaactgaggtcagccataccagagataaagcacactgtataagttagcttttagatgctgcaccgtcaggctgcacacacagttataacattagtaaaaatgagccaaactaatttagataaagcagatgatataccacaaaaggttgtgcatactacctgacaagtgacgaccaagtgaccaactaaccagtagagcagttgactgtagcagttgctccaagagcccttccttgtataggttctgtcaaaagatcatcaagttatgagtgtttttaacagttcaacatgcaaacatttaagtatttaaccaccatagcatttccttcaaaatattacaaaatttttcccctgggatagtagatttcttgctcagaggtccctttattaaggctattattgttcatacaattttttgaacttcttagttctattgacatggacaaatacatacgatcagtgaaataaggtgtagcaactccgtgatgatacagaataatccaaatgctaatagcttaggaaaaatagcttatcctgcattaaatagaataatgaattataactcacctgaaagtggaggattgatggtttcactaatctagttttgcagcgaaattcataatacttgctgctcttatccacttgcttgaaaaactgcatcactgcatcagccatcaggggaaaaacaatttaaatcaaaggcaaaacatttagatccttgggaggtaaaattatcaaggtatttttaatcgaatattacagccaaactttaacagtgaaacataattggttgtttgcttagcagccgcatagagcacactcacacaatggatgatccttttcggctcttgtcacgcatcgatcatggacatatgctgtaggtcgagaccgccgcaactgtgatgaatcaccacacagacactgcctcctagttgaccctaaacagcaacagctgcagaaagaagacatgaaacatggaagaaacatgcagcaaaggtgcatctaagtttctctaaccattgaagcaaggattcacacctctagcaaccgtaaagccaccggaccaccgcactgatccggccgctgtagagctgctgcttcaccacggtcgctccacggcgatagcccgactcacctgcagccccctcacacgtcttcgcgctagggccttgggtatccagaagtagcctcaagggaaggcagggtacaagaactaagatcatcacaagatcaaattaatactgcatatcaaaatctacctttttctaattgactaatccagccagcaagcaccaatctcggatcacctaaccacgggctctgaatataatcgaactaattttcagtcaagacacaattagaataggaaatattgccgatccctaacaattttatccatgaaaagaacaacaatggcagcctgagagagagagagattaatctaaggagagatgggagagaaaggggaggaaggccatctctctgcttttgcctgccggagcatatgccatggtcaaccgccgctggccatgaccgtggaggcagcgaagacggtggagacggcgctgggtaaggaactaacggcggccgccgggcatgttgccgccaagctcgttggcagattagtgccattatcaagctctagcctggatccacgttgccgttgaggtcgccatctgcttcgagccggcatggagctcgtcagccagacctgcgcgaccaccaaaatccacgccgccgtcgatgatgggatgtggggcgggcaactagggatgatgggagcggcaggaagaggtccccaatagatcttgaaaggcacatgccacctgtctagcaccggagagggccaacctagaactgcatcaaacaacaatgcatcacaaagcaggacatggccgactgaaaacaaagcgtcacacagcaatgcatcacaaaggaagcctctctttttcaatctggcctctcgggagcgaattggtacctcctgaccaccgaagagattgagccggccgacctccccaccactggcgctaacccgctcccgctcctcggcattcttctccaggcagtggtcgacggtcagcagctacacctcaccaccctgcgtgtccaggatgcaccgcgagtccccgactgactccaccgtgaccgtgaatccattgatgaccaccagcgttgccgtggtccccgacacctcccccgagattgccatgagagagtgcgggggtcgtcgccatcaccaccgtctcgctctcccgccgccgcatccgcctcctcctccgccgccgccgtcaccatcgtcgtcctcttcgccgaccgccatcaccaccgtctccatctcccaccgccgcgtccgcctcctccgccgctgccgccgtcgccatcgtcatcctcttcgccgaccgccaccgcctcttcctcccttcgacccctccgaatccccgtcggaacgagcgggcggcggcggctagggtttggggggccggagatggtggcgggggcgggcgacggcgacgacgacgcgaggcgacggggaagtcggaggcggcagcggccgtggtggcgcgaggcgacggcgacaacgatggcggagacgatggtgggagaggggtggcgacggcgacgacgacgacgatggtggaggtggcggaggcgatggcggaggcggccgtgacgaggcgaggcgacggcgacggcgatggtggggatggcggcgcgaggggtggcggcggcggcggcggcggcgcgagccgctcggtggcggcgctggagagggagagggacagggtgcgggcggcaacggatagggtttgggggtgttaggtagtgaacgccattttgcgaaaaagccctacatattccacttttacatataggtccttatccgcggattctcctctccaacaactgttcgagaggggcatatatgttattacataaaactggagggcctttttgcaaaaatacacccgagcactgtagtactgtaccgaatcgctgacgtggcatagtcgagcgaccgcccagcccgccacacttaatattttacatataggtccttatccacggattctcctctccaaaaactgttcgcgaggggcatatatgttattacataaaactggagggcctttttgcaaaaatacacccgagcactgtagtactgtaccgaatcgctgacgtggcatagtcgagcggccgcccagcccgccacacttaatagtttctagtttctaatttgggcgctattgtggtgtgcatacttgccggttggggtggagggctgctcccggtgagagggctgggcatttttgtaaaaaactcctcgtgtttgcacggaatatcacatacatcttcggaccgttgtattttctctgtccctaaatatttgatatcgttgactttttaaaatatgtttgatcgttcgtcttattcaaattaatttaagtaattattaattcttttcatatcatttgatttattgttaaatatacttttttatacatatagttttacatatttcacaaaagtttttaataagacgaacaattaaatatgtttaagaaaaatcaacggcgtcaaatatcttaggacggagggagtacgtacaaccgttacaatgcagggaaatcaattttgagggaactgatacgtggaaaggtattgtagctagatttctgttgttgaccataaagttgacaagttagtattgggacatatcatctagaaatgcatttacaggttgctctatttgaatatattagaacaacctctacttacaccactattggagcagctggcccactaacatacgctgaaagagacgaacatgtaattaagttccaagtggcatacggtgttttcttacagtaggtatgtaatttgaggctcggagttcatgtcagcaaatatatctatcgtctaccatcatgagagagatgcctagatactacccaaaacaacattgcaaaatcttttgtgacgaagcagaaggtatacttggtagccacaagggctaaggatggccgtgcccgtccttgttcttgaggttggcgtgcatctgctcaaacttggcttgcatttggtcagtcttgctattgatgaaagtgttgtgactgaacgcggagcgttgcaggcatccgcgcaccaggttgagctcagcgatcgtacggcaaccggctgcgatctcgaagaatgcgtgcaggttggcgtgcactcccatctctagcagtttgagagcctttcttgccttgccagatcggcatagttgtatcagttcaaccgatccaactggagatatcaggtgctttgttttgtgcagatcatggtaattacttttgagctgcttgaaaagccagaacgcctcctcaaactcttccgcattgtagctgacctcgatcatgagaagccaagagtcaagggtacgataggccatttgatcaaaggtcctgcgactgaactcgagcagatcgcacttgggatacatctcaatgagcttgttgttcacgccgcaatcgttgtgaaagccggagcacaggaagtagtggtggacatctttcaattcctccttcagtgctggagtcgagcagcttgcggcgagctcttcgaaggccttgcaattcccgcgagctccctggcttagtagatggatcgcttcattgacgcgtcccgcttgagcgaggttgatcagatcggctggtccggccacacgtgttggcgccggttggagttggcgctgccgcttgatcgctgccggagtgggctgccctgtgcgctgcttcatgggtggggtcgtggcggacgccggcgcgggagatgggaccagtgcggccgatgacgagtaggcgcgggtggccgcggcggacgccggcacgggaggttgcttctgctgcggctcgagctcgaccagtgcggccgcggcggtcgacgacgcgggtggccgcggacgagaacgtgcggcggtggcggaccctggtgcggggggctcgtccttgcgcggctggagcagttcagccgtggcgtgggccggtgccgcgggcgcggaggtcgacgacgagaagccccgggtggcctcggacgaggaggcgcggaggaggaggaggtcgtggccgcgcgcggcggcggcggcgatcgacgggatgatgcggacggcggacgacgtgggcacgcggaggagagggagcgcccaccagcttgggagccccgccccagccatggttttggcttgaggtaggcgacgacgacgcaggcaggagtcgcgagccgagggatttgaaatgaacccaaatcttattttgtggggaaatcttatttcgggagacttctcgcttcgattacttcgcgtttagcaaaatcgttgggtatgtattttggaaccagtaggcagctgtacgcatccatggcatatgagtcgaagagcatggcatggcaagccgaggatccgaccggtcggccgacgtacgtggtgcgtcttgacgatgtcggtgcgggtgttgggaacgggacgccgttgctggcggcggattgtgagctcggcgcgcgcatgcatgcggtgcgacaccgctggctcgatcgctcaagatcaacgcactcctctccactgccaccgtcgacacgcggagaaggcggcggcctcgcgggctggtctgccttagttgggccgagcccctggcctgtcttggtgctgggccgagcgaaacaataaataaacagaacaaggcaggggaaataaaaaataaaaaaacagacaagggaaggaaaccctcgccaccacgcgccgccgccgccgccgccgccgccgccgcccgccgcgctaccacctgttgctcgtacgatcggattcaaattgtcgcttctttcttcttccacagcacaggtatgtttgttttgggagatctggttttcagaaagataatattggattggattgaatcgaatcgatgtggtttcctacctaggacggggtgtagaagaagaagaagaagagcatcaagaggatgggttcactgcggcgggttgtgcacctggtgaccgcattgaacggcagcgccaacctccgccacatcgacacgtcgcgtttcttctcccgccggccgccgccgccgttcagcccgtcgtccatggcggtggtgacggaggaatcctccttgccggagccctccatgtcgttctacccagctccggccccgccggagagcaacggcgacatcggggtgatgctcttcggccgcgcccgcgacaggctgctggtgacggaccagtccgacagcgccgccatctacgacgccggcacgcacgccctgctcgcggagaccaccccgctgaaacccaagtactggccagtctccgtccctgtaggcgacgacatctacctcttcgacctgtaccccagggtgccctgcggcggccgccattgcttcgaggctgtcacggcggtggattcctcttcttcttcttactgctcccgtgcgctcccgccgccgccattcctgtttgccccgggctacagccccaagcctatcgagtcctacacggtggtcggcggatcggaggtgtggatctccacggcgcgcgcgggcacctacgccttcgacacggttagctgcagctggagcaagcaggccgactggccgatgccgttcgccggcctagcggagtacgtccccgagcacaagctctggttcgggctctcctcctccaggagggacaagcacccgctctgcgccgtggacctcgccgccgccgcctcgccggagacggggccggagctgaccaacgtgtggatggagctgtcagtgccgagggaatggatcccggtcgaggccttccttgtgcaccttggctctagcaggttcttcgtggccagattcttccaagagctagtcgaggtgcgctgcgacttctcgcagcggttcgacaggttcgctgtcttcaccggcgttgagctggagcgcacctcccgtggtgagctccggatgatcaagcacaagtcggagcgttacagcatcgctcacaaagtcctctgccatagtgttctttgatttcacaacgtcctcatcgtacctatttcctccgtttcatattgtaagactttttagcattaccgacattaatatatatattaatgaatctagacatatatacatgtttagattcattaacatctatataaatgtgggaaatactagaaagtcttgtaatatgaaacggagggagtatatatatgtctagattcattagcatacgtatgaatgtcggcaatgctaaaaagtcttataatataaaacggagggagtatctatgataaggcatgtaaacaatcaattatttggttggtgaagatgagttagctggagtattttgaaattatgcaatttcttgtaatactctgtattttcaaacaggaaattggaaaatagatgctccctctttagttcattggcaaaaaagaagtgaatattgttttgttcatttggcctgtctctagactataatgaatactcaggagtatcattcattgcattgccatcgattgaattttcattacattgccaacattcgaatcacacaacttttaaagtttgcatgcagatgttttagcatggcattgtttcccgtctgttactattaatcttgggattgagttgagtctctgaatgtggcaattagtctagagttggtttttttaggttcctcaaaattgtgtatgtaatgggggtgttactttgctggtgatgaatacaatgacatattcacatccatataggcatcaggggcatttctttgctgagatatattaacatattcacatccatatatgttgggaataaatggcacccatgccaactgaaaacaccactttttaggttagatttgtcgcagtgcatcacgtttcgtcgtttctgtttgtcttgccattcaaagcatgcacctcaagttgtttcctagctgagtctatagaaggagctaggcagctagcctataaaagtgattagatttactttgattctttgaagaagacaatctcaatccattttattctcaagccgttgatcaactataattgttttttacatatagattgttctggttctcaaactatcctgaaaactttatgcatttttttctaatcttaattaaatcggtagcactcctgtctcccattgttccttttctttttttaatgtcactacctaactgaagcttaggagcaatagaacagaactttgaacttaggagcagtagaacagaaggcgctggatggatagaactgaaccgtgagcttaggagcaatagatcagaatgtgctgtatggttgggcctcctattgtaagtcaatttcttttaaaaaaaattgtttatgccttcatcgattactttaacatcctctatgccatcctggttaaaacagattgagattgtccggtgttccatgtgcgtgtgcactgggagtggctttgtcagaattcttgttcgacttgatctttggcttaagtgaatctaatgtcaagcaatttatgtgccaccctttctctaacatagtggtagtcaacttcaacatgctttggttctagtgtggaattattggataagctgatataggttgcatcaagattgtcacgccataagcatggtgttctgttcaggtatactccaatctcaactagcaaagactgacctggctactgtgtgctggtttcttgagctccatgagaccaagtttttgccaggaaaagctgcaaatcgtccagtagaacatgtgtcattgaggcatctggatcaagctgcatcagtaattgcgctgattaattttgtagtttccttcttgtctgataacccatgatatatgatgattcagatatcttattatcctctttactgcagaccaatgtatatgaactgcaacaattggcaacaacgaccctccagtacagtaacttgttcaggtgatggaagggaagcttcttagcccagttgggcaatttttctgaagttaacataggtatgacggcagacctttcatatttgttctctttatctttagcagatcagcaaggaaagtaatcatatgatttccaaaagaaattacagcatcagacctttgtcaagaatgcatcatatgcttcagtttcagcttatgtaaatgccatattctgtaaaccatatgatgatgagattacttaaattgtgtttatcaacaggttggttattgaacaacattcgtcatcctaacatggttcagcagcaactccacaccagacaagactccagttcttccatccgtgactcttcaagagacccaagcttcaaactgccatgtgaatcgatcggtctgtcaacaagcggaggcgtccatcaaccgtaggatatgattgttggctgcagccaaaaattacaaaaaaaaattgatatgtttgcactgaactggagattaagcagttaatctgttcttcagattacttcaagccggtgaagcaaagaggcaattatgaataccatcacatttcattaccaggattagtggtgtgaaaaaatagcatgagagccttgcatgaatgatgatccatcaaccatatgattgttgcagcaaaaatcacacaattttgtttgatgtgttcgcactgaactgtttgatgtgttcgcattgaactggagcaatctattattcagattactttaagctggtaaagcgaacaggacaagacttaatcatagattaccaatctttactagtactctgtttttaaatattttttaatatactccctcgatttcatttcaaatttatgatgccattaacttttagtataaagttttcaaaaatcatattacctccatattttaatgtatgccgccgttgactttttgtttaacgtttgaccatttgtcttattcaaaaaatttattcaaaaaatttatggaattatcatttattttcttgtgatttgattcatcatcaaatgttcattaagtatgacataaatattttcatatttgcacaaaaaatttgaataaaacgaatggtcaaacgttggtcgaaaagtcaacggcgtcatacattaaaatacggagggagtagtttttttaaatataatgtgtgtaattaaatttgcctcgaaaaataatatcatatttatttaatattaaatacataagggttcaaaaacttaatcaaatcatcaaattacgattttaacgtcaaatatttatgaccgtattttctaaaaggtcagtattctgtttcgtccaaattcaattattaataactggactatttttagtcaataatatgagaaggacaaaaagggaaaaaaaaaaaagaaaaactctcctctcgcaagcgaagcaaagcatttccctccaaatccgctgcttccctccattttggcgccacaatctctctctctctcctcctcctcctcgccggagatgtcgtaccccacgttccacgtccacccgccgttcccggtgtcggcgaggaagaaggaggatgacggcggcggcggcggcggcaagaaggaggcggcggccgccgcgatgaggcggctggcggagatggaccaccgcgcggcagccgacggcgggaaggtggtggcggccgtggccgtcgacggcgacaggggcagccagcacgcgctcaagtgggcggccgaccacgtcctctcgctctcccaccccttcttcctcctccacgtccgccgcaagcacgcctccctccactccgccggtacgatcctcctcccccctcagctcacccatctcaaccctagaaattgatcttgacgtgatcttgatctcctttgggatcccggcacggaaaacggagagatggattagcgcacgattaatgaagtattgggttattggctaataaacttgaaaaaatgattgacatgattgatatgatagataatttttgcaaaaatacgtatcgttcagtattcggaaatcgtgcgcgtagaaaactagtgagtagaggttggaaaaggggagaaaagaacccaccttaatctgtctcatttgatgtgcatccaagttgcggtgctgttcatgtgatgtgcattgatgaattgtgaattttgcattgtattgttagagtttataaattttccaagtttttcatttatgcagggggaaagcaattctccctattgcacgtgcaggatgatgttgcagcttcttctcctgatcaaatggatcatcacaccaaagatctgctgctcccattccagtgcttctgcagcagacgaggggtatgcatccatttttcctacctctaccttgtcacgcagagattatgttcattttggcggaatctaaaatctatggagatatagagagtttctgaaaactacagactggaatgctcatgttggcatggacctgaaatcgatcattcatgtggcttttcatataatctattaagattttgctttcctttgtttgacctgatgatagcatgagcaaaatcatgacccttttttggctgacttgctttaatatctacagttacaatgcagggaaaccattcttgatggaactgatgtgtggaaagttattatagattttgtccttgaccataaagttgacaaattagtactgggggcatcatctaggaatgcatttacaaggtgccgtattattttacaaccattaagtcaaagaaaattgcaaccatttctatttacagtttattttctgaattgttttaatacttctcttttgattgctatattgatctcagttcttaactagtgcaggacaatatggaagttggatgtgccaacatgtgtcacaaaatctgcaccaaatttctgttcagtgtatgttatatccaaagggaaactatcttcattcaggcttgccacccatgcaaatgcaaatgataccagcaaagaagagctggagaatatatctgaaaatcggccgctaattgcaaaaagtttgtgttactctaatgctaattccctttagatgatattcactctagtatacttgtgagttgtatgttcattaggtgcatgtggaatttgcaggtgaaccagcaccaataatacatattgaagggcaaaattcatctaggtgagctttgcatcctctctctatatatatgctaacataaattccttgatgttttcatggatacatcaaatatgtgcccttctcatacaaactacccaggttttgataaatgagtttttttttttatgatagtgcactttgtcctggctgcaaccctttatctccaaacctgagtgaagaatgtactgaatcaacttctaaatactacccagtatgcttttgatattttcccctactctttgttattttggttttgtcacttgcagaaatataactattagaccaactgctttttgcaggaagatttggaggctgaaataaggaagttaaagcttgagctgaaacagaaaaatgacgatatgcacatgtggaacaaggtaattgtgataccttgtgctgtgttgcttattgtttatctcataaagttacttgtctctaatcccatattctgaaagtatgaattctaatggaaatttggactgcagttacctcttgggatcggagacaggagtgaaaactcaaatgcaagtgttgaacatgaggatgaacatttacaagaattcacgacatgttcaacccattcctacagtgagagaccaaatgcagaaccgagttccgcagttcgtggcccaaagcataagctcttgaaactcgaaacttcctcttctgatcaatgcagagagagaaccatacaggaatttaaagaccatagttcccaggatacggtgcatccgatcttaagacgtttgccgcccaaattttactcgcctagaaatgattctaagcatggatgtgcttctgaaaaggcttacaaccttgaactgaagtgtaaatctttgccaaggccaattgagacgaaaagactactggagggtcttccaactagattccaatgcaaaatatacacaacagaagaggttgcaaatgccaccgatcatttctcaccggaactgaaggtaggggaaggaggttatggaccagtctataaagctacacttgacaatactcttgttgctgccaagattctccattctaacataactcaaggactgaaacagtttcaacaggaggtatgtccatggccaattttgtttgacacaagtatcccaccaccacaatctctttaatttccaatcaaatgagagtgatgttgggaacttgggatagatactgacagtaaaatgttttcagagcagcacaatcatattatcatttgattttggtaatattgtcactatagatagccagatacttctgttaagtcaaaatcatgtagacaatgatgtgtttacgtgaaaatttcaaatttcattcacaaaaatgaaaaactcaacattcagtaatatgaaatcatagagactattgtggtgcatccaaaaatgaaaagggaagggaatcatatgatttacttttagtcctttgctaaaaagaaaaacatcatgcatcagtttcagctatatataaatgatatatctgtaaaccatgatggtaagaatttaaattgtgttatcaacaggttgagttgttgaacaacattcgccacccgaatatggtgcatctgttgggtgcttgccctgagtatggctgtctggtgtatgaatacatgccgaatggcagcctcgaggaccgtctcttctgccggtcaggcaccccaccgctgccatggcagctccgtttcaagatggcagtggagatagccactggcttgctctatctacacaagatgaaacctgaagcctttgtccaccgtgatctcaagcctggaaacatcctccttgacaaagatttcgttagcaagatcagcgatgtcggcctcgctcgcatcattccccggtcgatggatgagacggtcacgcagtaccggatgacagatgctgcagggaccttctgctacatcgatcctgagtaccagaagactggattggtcaccacgaaatccgatgtttatgcgctcggcatcatctatcttcagatgatcactgcaaaagatgcaatggggcttgcttacatggtctctgatgcactggaggaaggaacatttgaggggctcttggatcctaatgtcaccggctggcctgtgcaggaagctcagaagtttgctgagctttcactgaaatgctgtgaactccggcacagagaccgtcctgacttggaatccgtcgtgctccctgagctgatccgtcttcacacattcgttgcatcatctggagataattcttccatcgaccaaggccaccagcgttcagtcagcgacaaggtaaaacaaaaaaaaggaaccatcttttctctgcaaattctcaaatgaaggcatcaggatatctccaatatgtgttctgaacttctgaagttatgggtgtttcatctagactaatattgttctactctaaatgcaggagttggctctggaaaatgacttggccgagattctgaacgatgggctagtgaagggggcgtcatttgcagcataaaagtgcaaggggccagtagatgttattctgtcaaagatactggaatctgcagtagttttgattttgctgtaaatactaccctagcccagaaatttttgaataattagatcatttgggaaacgtgtactaacaacaacctgtaaattgaacacaatctatagctctcatctggtagcactgttcacttctatcaactgccaatgggatcaactgaaaccgatttgagcaagggcttgagatcatgcctttatcaggatcaggaatgccagaaatcttttaccctgatatatcacattcttcaagactgttgtataaagaaaagcttagttgttgaactcgcaatatcacaatgcatttgccaaattgtgcagaaagatgcttttacatgattggatgacaaagcctatttcgttttgttgatcataacaagccaaataaacctactgttttgaatgatgattaagtccaccatcaaatcaaaccataggtgatcaataaattttctgttggcggcctgcatgattacatgctagtggtatggggggaaaagatcggcgatggcaccaaaggaagaaatcaccaccattgctctggtctctggtcccatcgtccactacagacaaacaacttccatgttgaaggcttgaagccaccgtttctctagaccaatgagaaaaaaatgatcaatgagattttttttttcatcacgaatttatatgagagatagtttagcaacattgacatttcctttcacctcatttgattttctaattaaaaaaaactgtaaaatttgtgttttccatatattatttagaaaatcgataaaaaaaatctagcctctatatctaaaccggatgtacacagccaaagtattttccacatttgtcccattaaaactcatcaacttaccaagaaatgtaaccattccccttgataaccacgccaaaattttattcacaatagtatgtttttcaagaaatagatttgaacccatttttatgtttctaaaaagggacatatttgaaacacccattttgttaattgttataaaggaaatggaaagatgcccatgccattgccatcccaagtgcaccggtgccaccttctcccagcgccaccacactctccatctcttgtcaccttgctctactctccccttcttaacctcttcacgccaccgccggccaccaccaccactctctactccggcgacatcatgttcatcaacacggccagcttcgtcgccggcgccgtcgtcgcttcgccggagcagccggccaagcttgtccgggatcagaggagggtggtgcctggctcctgcagggcaagaagaggtgcagcatccaatggcttcagaacttactgcatgcaggtgagcaattcagcaaacatgaaactttctctgcatatctatatgttacttttgttttgaggagtcgaaaaagatcagatcaaagtgttttcttttcggcatgaaatacttgcaaaatcagcttacagtaaattcagcgagtgatttaattttgttgtagacatggaaccctttcaccaacaggaggtacgaggcgatgtcttacctgcctcccctgagcgcgaagtccatctccaaggagatcgagttcatcatgtccaaaggatgggtcccttgcctcgagtttgacaaggtacaaactaagcatcaaacttgtcctaactctttttgtaattacactaattttctccatgatgaatttatccatcagttagtatttacccaaaagaaaaatgtattgttataagtttgtactatgaatggatgatatggtgtaggagggggagatccaccggagcaacagccggatgccggggtactacgacgggaggtactggacgctgtggaagctgccgatgttcggatgctctgacgcggcggcggtgctccgggaggtggaggaatgccggagggagtacccggacgccttcatccgcctcatcgccttcgacagcagccgccagtgccagtgcatgtccttcgtcgtccacaagccgccgtcggccgccgcttctccggccacggtcgccggagctgaatgaaccaaggtgttcagttcatgttcatcctcgcttcgatgatcatcagtcacagcatccatccaaccagtttccttcctcttcttcggtctcttgctcacttgcatgtgctgtaccacttctttcagttcaacttcaacctcatctttgatgactactgtgatgtactaatgttgcttcgagtataatgagcacaatgatgatcatagcatccatccaaccagttatcttcctcttcttcagcatcatcttcatttgcaggtgttctatgtacctcttcttccagttcaacttcaacatctaatctttgagcgatgtgatgaactggtgttgctatgagtatcatgtgcacaatgatgaccatcttatgatcatgagttgcttcagaagtttacttgttccttcccatcaactctcttcacaaatcgagaaaacaatgggtcacgggagtatcgaccaacctgatctgcacatggctttctgctgaccccatgaccaactgccgtctgccgagccagacaatcaatcatacaccgtaccgtacttctacagaaatgcaagacaaatagtatcaaacatcatacaccaggtacacaagtgaaacctgcagcaggatccaaggtccaaacctttttgcatgtgcacataaatttaacttctcaaacggtagaactagaaggcaagaaagtgcagtaggagacagtaaaagcaagggtctaaaccgaacataacattagtgcagacattttgcatctattgtcttaagaaaaggaaaaacatcaggactcctcccattccccatagaagtcagcagcacatttgcatttctttcaaccccagatacagcaccacatcatcatttatcctgacaaggcatggttagctcggattcgtcagtgtcgacacgaagcctgcttcatcccaatgtttcccggtacatcctgagaatcatccctccctctcacagcagctagcaacagagcttcaggtacccacacacttgtggcaatttcagaatgttcctaaagctgaccaaaagagcacagctcttgatgctctgtaccaacatggcggtacggataacagaactgtaaactatggactcctaagtgaaaaaacagaaataagttgctggataaattaaacctactgtcatagcaaataaagtagagcaatgaacagattgtataagttaaccgcttcaatgaaatttccaatgaagaatcaatgcaacgatctgctacgaaagaatgggaccaaaatatgctcccctacaaagagaacggtacgagctcccctctctttaatgccaaagttccatgcagaaaccggagcgaacagaaggtggccttttgctgtagatggcctcagagaaagtgtcagcaagctggccagaaaggctaacaggatcatcaataagagtgtttacgtagacgctgactatcttcctgtcatgaggggtagcacgaaggctataccaagtcagaaacttcactctgaagttggtctcaatgtaaccctcacattccagccacctgaccaccttaacacagtactcataagatgcttctgggcatccatccttgtggccgatttcctcacatttacctgatgttcttttatttgaagaattccctggttccctttcaggcttggaagagccattttgaaggatgttatcaccaggttttgctttcaagctcctcccactgatatccttaccattttccatatatctaggtgcagttggtggaatagagccagaatatcgaggtggaacaatcaccacctcatttccagcaggagcatttgatgcatcctgtgatccaggaacttcgcttctctggttctgctccattgaatttgaggattctctaagtaattgtgtttgaactgctgaattgggctcctcgtccaaagctgatgctgagagtccaggagcttcctccaatccagatacctccgtaaccctagctacgaccatcggcatactctgtgagttgtttgtaggttcattggggtgatgacttgctttgtctgaatcaagtatctcaggattttcacaatattcaaaatcactttctggtgatttattgagatcagcatacaccgcagtgttattatttgagtccacaccttctgaagaaggatcagactgaccaccactgtttgcctttgggctcccattgttttggtctagcccagacccacctggcatcaaacccttcagatcaacttccttctgacagcttgtcttcattttggcttcccacgatccaaactccttgtagttactgaaggcaactaccttgaatatatagcttgtagctggcacaagttgagtgaccactaacgtttttaatggtgcaagtatgatgccagttggacttgatgagaacgagcctgtggctgccactctgtgccatacattaaagcatgttacatcttgagcaagtataggacccaaatccaaaactacagtgacagatgtttgggttatagcttcaaactttacgaagtttgatggtatcatccgtgaacctgaaaatgcacatatgcatgagaattcaacactatttgtatgtatgtggtctaacgtgaagcacgtggaaacttacgttgaaattgcaagttagaaggagatccacaaaacagagactccatggtttctattgctcgagcacaaagtttctgaacttcagcaccaacagcaagccggctcacaattccacgacccatatttgcaactccagatataggaccaacctcagcctccagtttcttcatcgctgtgtcaacaatttcatgcaaaaccaagtacttctccgtggagacaagaatcttatgactcaaaaaaatccgatgacacaatacatccaaccggcgagcatctttagctatcaccagttgtttcttccaggacctgaacaaggcattaaacagtcaagtattgctcggcaagctaatttactgtttcaatatccaaactcttgaaaggagcatagttttggaaaatgggccagtaaacttgattgaattacttaagtgcattgtgctggactggccaaagaatcttgaactctaaataacatataactggttcaaaacttactactacaagatactaatagccaagcagattcttttgagaaagacaattaatcacttgtcttgtagttcaaaacttcaaaatgaatcctatttcccaggttactcaaatggcttataaacatgcacagacaaattagagactccttgcatatactagtctaagcatttctccatgatctattcatccttgaaaatattgaatccacctggcctcagtgcctcaccaagttttactggcttagtaacttggttcataccctgaaacttgaactacaagaaccctatggaatgcaacacaaagacaccaaaatgcagtcgaaagcctgttttcgcagctcgcaacctatgaaaatagggttatcccagcaaacaaatttactccagatggagaaggaagaatccaacactaattcagcttaatgcagaagtaagcacacagaccacaagctcaaagcatgaagctgaagggcaaaagcagccaacccacttcttaagacacaattgagaaatatgcatcatatgattggaccaatgatgatgacactacaaggatcttcaccgaagaatcctaaaaacagaatcagtaaggtaatcaaagtggctggaaagcaagaatgcatgcaaattatcaaagctaactctcacaaaagtcaaactaacatatttctagtagttatcgttgcaataaataatggtaacattacttaaggcagtaaaaactggaggcataggaataattaaaacataatttcgtatagttacagaacaggaaaaaaaactgtgcaaataataaagttgtttagggagaatacccaagcagatcattctgtttccgacagcgagtgcagtaataaccaccatcaagtttcttgcactgcccactctgcatgatgccagttcttccatccttaagagcacattcaagatggcacgaaaatacacaagaatctttctgcaagggttgatctgaactacagaataaccagaggctaggatccttattgtcatcgtacttgaaacaaatacagcatgaacagcgtctgcaaaatttatcttctggattaagagtcgctctgcaagctaaattgtggcagaagcgagcattacttgctggcctgggtatttctgtagttggactgcttgcaacaattggtagtcgtgatgggttgtcactctttcgctgccgtttcgcaggggactgatggttggctgtgttgggttcaggggtaggctccttctcttgcacatgctccacaacgccaccaccagatgatttgccagtcacaactctgaagagatattccaacattctctgcttcgataatccagtgtacttcctttcccttcctaaatcagcacaaagaatctctacaatttcacggcgactccaagactgcagtttgtcaggagcactttctggccgcttcgataattcacggacaagttcccgcttttcatccacactcatcaatcggcatttagcaggatcaataggtactcctaaacaagagaacactggaaactattattatcaatttgataaagtcagaaatagttacaaaatccagtcggacaagaagcaaacaacgaaggaaatttagacgttcattcatatttacagtccagaatggaaaggtttaaagttcattagatccagtagaagaatacatattttgaaggcatcattctttctcttcttcagaacaactatgagacggtactgagtaacttagcgtgcaaggaaaaactcaatgaatgacgttccaaaggaaattaaattctcgacatgctgaatcaaattaatgtgagtagcacactgtcttactggagtagaagtcaaattataattatagcacattgcaacagaataagtcttaacctcggaaaaaaaagatgattcggtcaataatctaagaattaaaggctcatcaacatgtaccatattgtataggactaaatgtgaactacaaagcacagttgtgataccacaaggcgcaatgttaactagagctatcgaagctggcacgagccgcagaaagtcaactctctacagactgtctaagggaaacgagaaaactaaaaagaaatgagtctttctaattttggaccactaaacaaagaaactatcatcaatcatataacccctaaacgtggtaaccttgacatgcaagtagacgcagctcctctagaagatataatcgacgtatcagccaatccttaccatcaactaacagcaaacaaacccgccttcggcagccgtgatcccaccaaatcagcaccaatgcaacacccaacgcacgaacaggaggcctcaaacagcctaacgccatattattttcccgtcccaaaagaggataggctgctgctaccaacgcccgcggacgtaaatcccacgaaaacgacgtaaagccgcaggaaccactccgctgccacctcccccggtagagagggggcgcaatgtgagtacccatcaccgcatgcagcggcgaatctgacaccagcggcatcgccatccaccctccccaacgcgcttccacctccacccctctaccacgcatcagctacagctccaaatcaacccaacaaaccaatcaatgaacagtacaaaccctctaccgccgcaatctaatccacgcgcgcataatctaacccatccatccatccacacaaaaagtctaaatctcgacgaacactacaccaccccccccccaaaaaaaaaaaaaccgcctcccaccctaaaatccacgcccacaaattcctcctcctccaccaccaagcccgcaattacaccgccggaacagcggattcgtcgccggaacaaacagatcgagctccccccgacgccgccgcgagacctgagccatcaccaccaccacacacacgcaacaacaacaacaaaaaaaaaaaacaaggcgaaaaccgcggatgcgggggcggcgctgaccgacctgcgtagggtggatccatggcgaattggggatcggcgagaggggcggatgcgcgcgggagagggatctcctcctcctcctcctcctctcactcacgtggactctcccctcctcttccaacctctctctctctctctctctctcctcgcctccgcgagtgctctgctagttatctctctctctctctctctctctctacgcgaggttaactcctagccttaggcgtccgcacgcatatcaaagcctagggtgaggtgaggcttttgcggtttggtcctcgggttctcgcgtattcggtgatgggtcccgactccagagtgattagcggctctagcggtcaacgaggttggttgttggttaggcggctctacttggggtttgttgggcaaaatagtaatagtggtatagttcgtgttcatagttcagagcttcaaattagcatacattgtaaccaagctaacaagcttgtagtatgataataagagtaggttgagaagtgtgataatatcgagttgcggtggatctagggttggatgaggtctgacatgtggttgggctatgggtatagccggtagcgctgtacaaccaaagttgtatatttcgatctcttggtattgtagttgtaagtgtcacacagctggagttcaactgtaccaaacatcttgtagatttttgtcgcgttgattcatatttcaattgagttatttttaggtcatttttgtatagtttacgtacaatataaacaaaggcttataggatcgcacgtaacaagttgtagggttagttgaaccaaccgtttgtgtgtaattagatccgctaatcaatattaaatgtagtcttcgcttagctaagctcctcgacatacatatacatgataaagtgatacatactaccacataattcccattcttttttttgtcacaaatatgcctgtagtgtgattatagtaaaataaaacacatgaaaagaattgtatttggcagatgacattgataattaaaatgacatgtatctaagaccgaaacaaacaatatgccattttgtaaagggtgcattcagctaacaccaatactatactatacacaccgtcataatcttcctcacaaatcataatccagtggatctacatctactatagtactccctccatttcaaattgatctacatatttcataggtacaccaagaccaagaaaagctaataactctctcatactatatttattctagaaacaaactcaaacaccatccccactatttcctagccaatagcaaatcaagatattgcatgtgtgttataaatacttgtgtgcatggatgcatgcatcaatgtctatttactccaatgcacaagtaacgaatagacttaataaataagcacaaatatgtagatcatttaggaataaccttaaaaaaaactatatgtagtcaatttggaatggagggagtacaatagtatggagtaatagtgctagtataaagtactagaataaaagaatactttatacattagggtatataagcataatttataacctaattggggttgatggagaaagaaaacaattaattaatcgtgaattaccaataaatcaattgattgattactctaggtttaaaggcgacggagaacgaggggggcagacgggaaaagcggcaaaaggaatcggaatccgacggctgcatgcgtggggcgggcgcttacgtggccaccgcctccgccgcccgcggcacgcgcggcgaacggctaggcgcttcaagattcgtgcggcctcggcctcggagagaggggtgggcatcgtcttccgagctgagctgtcgatcgccattattaattaattaattaattaactaccactactgctgcagttgctgcatgcagtgcaaacgcctttctccctttcttttattaagacctcacttggcaattttttttgacctaggagtatacttaagactaatgaacaatcatttcacgaggagtattttttagagaaaattttatgaatattctacagctatattgcagtgtactccatccgtcccgaaaaatactcaaccaaatataacccctcctaaaagcaggtacaatagcagactattagtcagctataaacatattttaatgagataaaagatgagagataagagaagcagtctacagatctgtagccagctgtagcacggactccaagacacagtatgtgtatgacaggtgagaccatatattaatagtatagtaaacaactattgtatgaattagctattagattggctatagataaattggagctagtagtgggctatactattaaacttgctctaatataactaatctgggcaaatggttagagcttaggttttagataaaagattgtctagatttgtcgttaatataagtcgtttgtaacaaatatctaaacttgtcaagtttataagtcgttttggatttgttttaagccaaaaactcctcaaattcgaccaggatcacaaagaaggtgccgacatttctagaaaaatagagtaaagtgcatgagcagtccttagagtgtcatctaggtccccaatctcttaaatgtaaatctagatctcaaaacttgttaaagtgtcatataggtctagaattctacatggcgctgatatggcataccacacgaatgtgatgtagcataatcttgacttaaaaatgggacctacttaaaaaaaattatttttcttctccttctcttatttttttcatttcttctccttcctctcactaaaaataggctaccgccgcatggggtactcaggtcacagagaaaggaacagaaaaggaaaaaaaagagaaggaaaaggaaaagaagaaaaaagaaaaaaaataagtgggtcctatttttcagtcaagatgataccacgccacatccatgtggggagccccacgtaaaattctgaagaggttgtggcgatttgagacctaaataacatattttgataagttttgggactttggatatgtattttgagagtttaggaaccaaaatgacacaccctataagtttaagaacagtctgtatactttactcataaaaatacatacaaatgatagatataactaaaccaatctaacattgtaaacgttattatattttatataaaaattagtcaaacttgaagaaatgtaacttatcacgaacccaaaacaactttctacaacgacgagagtatattttcctcagaacataaaaggaagtatggacaaacatgtctactgcacaacacaaaacacagtgatgtataataccacagcgctagtagagtactttgcaggcattgatgctatagggcggtccagtgtagtacggctgtgtttagttcaccgcaaaatttgaattttggttaaaattagagatgatgtgactgaaaagttgtgtatatgacaggttgatgtgatggtaatggactgaagtttagatccaaactctggatttaaacacatgcgtacgtagagagtatcacatggtggtacgtacatggtgcaggcaagtacgtacagggtacgtgacagggggaaagtcaggttgggggtgccctgtagcatgcatggcacggcatggatgggcccatttcgccagtatgccatggcaaagctttaatatcggtcgatattttactacaccgtgtcttttgttactgatatatgggtccagcgattatcggtctcacatgtcagtggctttagttagagcaagtataatagtgagctataagcttactataaacttatgtggaggagagaggtaatgaaaaatcaaagatgttggctcttatgcaagagctagcttatcacaagttccaagacaaatacaattaatttataagtgagagatatggataggagaagaaaattatagccagccttatagataatctattatataaaatatgttggtttaatatctccctacttgggttggcacttggcagcgtcgttttctgttgggatatgatccgaacagaaaagcacacagggaagagagagagagagagaggagagagagtgagcaaaaagctctgcccttttggaaaggagtatctcatccggtatatatgtttttgcgcaactagctgatggatatagtaacacggacatataccacaagtgatgacatgagagcatcgggtctaaagcgtgtggtttttttttaatggaggattcgacggattatggtttatggatagttaattgtagagatgaattaaatgttgtatagcatgtgtcggtgatatggggccgggggtatcgtgactagaggcttgggtagccgcggtcacccacgtggcctgaccccctgggggggtcgggcccgagggtgacgtggccacccctccctctgtctccccgaggggtcgggccgctcccgtttcggccccgagggctggggcgccctgaccccctgtggttttggcgccacgtatgtgggttaggtaagcacagcgggctcacctaaccgcatttatagcaggttggacgagcgcgccacgccgcatttaatgcggcgcagcgagcgcttatccggtccgtgaccggtcgcggtgacagaccggtcagatcgcgggttaggtggcaacaggcggcctgtcacacgcctcgccccgtcccatcggaatgatgagagctacctggctctcgtccctagccggagccggcgtgctaactcctggagttggtatgtcagtcctagtcagatccattccagacttcagcgcaagtatggcaaggaagtcgctggccattaaatgaaggttgaaatgggcgtccaccggaaaagcgggcgagcgaggcaggaggcgtgtgctctgcttgtcagaggtcacttccggctgtagactagccctctttgtaaaaagcatgtttcccttcttaggcagctagagccccatgtggtgacccctgaccagataaaaaggaggcccaggcctaggaagaggggggttgggactctggcgagggggttctagagcctgaactctctctcgctctccggctctctgtattccttcacacacagatccaccagaacacaggagtagggtgttacgcttctcagcggcccgaacctgtctacgtcgcccgtgtcttgtgcactccctctctcgcggacgttcctcagatcgagggcgaagaacctcacttagcgcccccggccgaaccggcaaaggggggcctgcgcggtctcccggtgaggagccccaagctccgtcatctggcgcgccaggtagggggcgcgcgtgtctttcgaagccctcgtcctctttcgtgtgcgccaagcttcgcccgctcagcccaatggccgaacgggcagtggcgcacagcctctctccgaacgctagcggtgacgacggggagcagaacccgcgccgtcgggctcgcaccccaccatccccctctcgccgaaatcttgggcggggggaggcgctcaggaaggtcggaggttccgcgacttcgccactcgcgggcgacgggggaggacggcgagacggggcgcgtcgccgcctcgtctacggcgatggcggcacgccccagggcgcgctccaggctgcgggcgcgctcctgcgtcacccgcccgtcgtccccgatccagagactccagcccgacgttggctggatgacgtggccgacttggtcatgacggcgcagcaacgcctaggcgccggcgggcggtcctccgccaccgaggcctctggcgctgccgccgccggctccatgtcgtcgaggcggagggcgcggcgagcggcggccgttacccgccgttcgtccgccattccctcgtcaacgcctccgacccaagaagatgtgcgtggggggccggatgcccgcctcgatatcgagcgccggcgcgacgctcgtcgcgccgcccacgcaacggagggcgcttcctcgtccggagcgccacttcggtccgggcacgggggccggcccccgtgtccccggttggcggtgccggctatcgagcctttgtggcgagccttcggaacgtccgttggcccccaaggttccggcccaccatcaccgaaaaatacgacggaagcgtcaaccccgccgagtttctccagatctacacgatcgggatcgaggccgccgggggtgacgacagggtcatggcgaatttcttccccatgaccctgaagggtcaggcgcggggttggctaatgaacttgccacccgcgtcggtccactcttgggaggatttgtgccagcagttcaccacgaacttccagggcacatatctgtgcccaggcgaagaagcggacttgcatgcggtacagcgaagggacgatgagtctcttcgcttgtacattcagcggttctgtcaagtccgcaacaccataccgtgcatccccgcacacgcggtgatctacgcgttcaggggggcgtgcggcacaaccgcatgctcgagaagatcgcctccaaggagccccagaccaccgcgcagctttttgagctcgcggaccgtgtggctcgcaaggaggaggcctggacctggaactcctccggttctggtgtggcagctccggccgcccccgggtccgccgctcggtcaggacgtcgggacaggaggaggaagaaggggtcggcccgttccgacgacgagggtcatgtcctcgccgtcgagggcgcttcgcgggccccccgaaaggggaggcctgcgagcgacaaaaagaaggaggccggcgctcccggcagggagcgcccgactggcaagtggtgtaccgtgcacaacaccgccctccatgacctcgcggactgccgcgcggtcaaaagtttggctgagcggacgaggaagtgggaggaggagaagaggcaggagcgccgtgagggcaagaccccggcggctcccgccggcaaccggcgaggtgaggccaagcagaaggccaccgctgaggacatcgacgatggcgacgatgacctggggttccaggagcctgaggccaccgtcgccaccgtcgatgggggagcgtgcgctcacgcttctcgccggagcctcaaggccatgaagcgagagcttctggccgcggcccctacccatgaggcgacgcggcgggcgcggtggtcggaggttgccctcaccttcgaccagaccgaccacccgccgtgcgttgcccggggaggacagatcgcgatggtggtttcccccaccgtttgcaatgtgaggttggggcgtgtcctcatagacgggggtgcagccctcaacatcctttcccccgcggcatcgaggccaaccccgagaagatacgagctatagagcggatgcgcccccccagcaagcttagggatgtgcagtgcgtcaccggctgcgtggccgccctaagtcggttcatatcgaggctgggagagaaggcgctacccctatttaagctcctcaaacgctccgggccgtttacctggacggaggaggctgagcgggtcttcactcagttgaaagcgtacctcagttctcccccagtcctggtcgccccggagccagatgagccgttgctactctacctggcggcaaccccgcaggtggtcagcgcggcgttggtcgtggagcgcgacgaggacaaccctcactccgcgcgtccccaccctgtgtcgactcgacccgggagagagcagggaggagaggcccccgaaccgaacggcggcccgaggcccccgacggccggagctggccctccgcctgcttgtccgacggtgccaggtgcccccgacccccagaatggcctcggggccactgcgggaaggccgcgcctgtcaccctctgaccccgaggtcgtcggcacaaaagccgagtgcgccccgcgtggcctctcggacgaagagcgccctagagatgcggcccctggcgaagaggatcggccccgccgaaaggtgcagcggcccgtctacttcgttagcgaggccctccgggacgccaagacccgataccctcaggcccagaagatgctttacgctattctgatggcttcgaggaagttgcgccattatttccaggcgcatcgggtcacggtggttacgtcttaccccctcggccaaatcttgcataaccgagagggtactggacgggtggtgagatgggcaatcgaactctctgaattcgatttgcgctttgaaccacgccacgcgatcaagagccaggccctcgctgactttgtggcggagtggaccccagctcccgagcccgtctccgcccccgaggctagttcgggcccctcgcagcggcctcacaccgtctactgggtgatgcagttcgacggctccctgtctcttcagggcgccggtgcgggggtcacgttgacctcgccgagcggagacgtcctcagatacctggtccgcctcgattttcgggcgaccaacaatatggcagagtacgagggactccttgcgggactcagagtggcagctggactggggatccgccgcctcctggtgttaggcgactcccagttagtcattaaccaggtctgtaaggagtaccagtgctctgacccgcagatggacgcttacgtgcgccaggtgcggcgtatggagcgccatttcgacgggatagagcttcggcacgtgcccagacgggataacgcggtcgccgacgaactctcaaggctcgcttcctcgcgagcccagaccccaccgggcgcctttgaagaaaggcttgcccagccgtcggcgcgacccgaccccctaggggggacggacgcgcctgaacggcccccgaggcccgtcggagtccaggcctcgggacccgaggggagcgctcccagctcccctagattgattgcttggatcactgagatctaggcgtacctcgcagataagactctacccgaggaccgcgaagggagtgaacgcgtccggcgcatctccaagcgctacgtgctggtggaagggaccctctatcggcgcgcggctgacggagtcctcctgaagtgcattcctcgggaacaaggcgtcgagcttctcgccgatgtccatgaaggcgagtgcggagcctactccgcctcacgcaccttggttggcaaggcctttcgtcagggtttctattggctgacggctcttaacgacgcggtcgacctggtccggcggtgcagggcgtgccagttccacgccaggcaaacccatcagccggcccaggccctgcagaccatacctctttcgtggccgtttgctgtctgggggctcgatatcctgggtccgttcaggcgggccccgggcgggttcgagtatctgtatgtcgctgtcgacaagttcactaagtggcccgaggcttatccggtcatcaagatcgataagcactccgcgcttaaattcatcagaggcatcactgctcggtttggggtgcctaaccgtatcattacggataacggcacccagttcactagtgagctcttcggtgactactgcgaagacatgggcatcaagctctgcttcgcctcccccgcccaccccagaagcaatggccaagtggagcgcgccaacgcggaaatcctcaagggcctcaaaaccaagaccttcaacatcctcaagaagcacggcgactcgtggatcgaggagctgccagcggtgctctgggcgaaccgaaccacgccaagccgagcaaccggggaaacgcctttcttcctcgtctacggcgcggaggcggtcctcccatctgagctcaccctgaggtcccctcgggtcaccatgtattgcgaggctgatcaagatcagcttcgccgagacgacctcgactatttggaagagcgaaggcggcgcgcggccctccgagccgcgcgctaccagcagagcctgcggcgctaccatcagcgccacgtccgggcccgatcactctgcgtcgacgacctcgtcctacgccgggtccaaacgcgtgctggactgagcaagctctcaccaatgtgggagggtccgtatcgagtgatcggcgtcccccggccgggctccgttcggctggccacgggcgacggcacagagctgcctaacccgtggaacatcgaacaccttcatcgcttctacccctagtgggggtcgggtgtcatgtctcaggctcgggccaaccccgcacccccccgggcgtgcagggttggccgggggctaccacatgcatatactcaccttttttctcttccgtatttcaataaaagcattttcgatttcctgaggactgtgtctgtgccatcgtttccttttgaagaatcttggcttgaattagcacgctcgtgctcgaccctgccctcggtggcccgggtcggctaaaatcgccaaacggggcccataaccgagccgtgccccggggcatggtgaactccggggggaatcggcaaaggcccacaatcgggtcatccataaccctcggtcaccgcgctcccggcctggccagtctcgacacgaggatctccccaggcactagccccgacccgcgccgtttgaggctgggacctgggcacgagcccttgttcaagccaagacatagaaggaccgcggcacagaccatcctcgtctcatacacacaacaaacagaactgacgcagaaatttcctctttacttgattacagatcaaatcagtctatacaaggagggggcccgaaggcctcggaagaagaagcaaaagttattaagattggcgggggcctgggggctcactccgacgcgcccgggtcgtcggcctcgtcgtcgctgtcgtccgcaccatcgtcaccgccctcctcgtcggagtcgagcgcgaacgcgagccgaggggccgtacccttgaagctgtggacgatgtggtcggcggcgtcccggacctgcgcgcgcgcgccatcctcggttccgggagggaactcttccagcgctgcccacggggagaagtcagggtccctggcctggtagctcgccagtacgagctccaccgcccccccccccccgggcgaggtccctcgaggatgacttgatcgtctcctcgagctcctcgaggagccgctggagggccccggccatctctgagaggcgctaggcgaggccctcctggttggcggcgtacttcgcgtaccgcccgccccagaggcccgcctgccacccggcacggtctagacgggagacggcgtcccgaagcatgccgggccctacttcgctcgccaagaggagggcctcgacctccccggcggacgagtccagcgcgccctgcagctcggcgatggtgtgttcggcggctgcgaggcgggcggctaggtcgccgtggcccgcggccgccccgccactgtgcgccctcgcgtctagctccttcgcccgcgcctcgagctcagcggcccgctgatccagtgcggccctctcggcgtgggcgccttccagattgcggcgcgcctgctcctcccgcgctgcctcgcggaggaacaggctgtccgccagccgctgcgccgcggcctcggcctcctcgagagctcgcccccgctcggtgagcgcgtcctcgcggaggcggagtgcggactccttttcggcgcaggcggcctcgtgcgccgccagtgttgcctcccgggtggcgacggcggcctcgcggtccgccaggtctctctccttcgcgtccagggcgcgggcgcgctcctccagcgccgtggcgcgagcctcaagggcctcttcgcgctgccgggacgccgcctcgttctccgccgcccgccgttctcgggcagcggcggcgtcgagcttctcctctagctccgccgcctggctcccgtattggaggcggaggtcgtcccgcgcctcgtcgagcacggcggtggcgatgagggcagtctcccgctcctcctccacctccctggcgatctccgccaggtccctacgacgggcctcgatctgtgaggcgtgccggcggtgtgccttgcggcccgcctccaccatggcctccaccgagcgccgcccctcctcgacgcgcgcccacgccgcgtcgagctccgcctgctccgcctacagggcctccatctgggcacttaacccgtccagcactgtgctgttcgcggcggccaaggcctgcaggaggggctccgcgctcagtggggcagcggaaggcagaggggagagccgcctcggtgtgggtgccgcgcggctcggcccgccgatcgacgtgccggactcgggggcgtctcccgaagctggctcgtcccaaacgtcgcccgaggggtcgggcccgagtggcgcgcccgcggcctcgtcgtgggtggcctcggaagtcggcgtcgcctcgggcggagtcgggtcgggggtttggcaggccgcctggcgtgcgcgcgccgcctctgcctcccggacggactccacggcccagcggagtctggcctcctcccgagcggcctcctcagcctggcgaacacggacggcctcctgggcagcctcctcggcttcccggaggcggtccgcggcttctcgccggtcagcttcccgccttcggacctccgcggtcgccgtctcctcggcctcagaccggccggacttggaatggcgggggggggggggggggggcgacgggatctcgctgaggcagaagaaaaaccagaagacaaaaagaagcgggtgagtgaaaactcgccttgggagatgggagaatgaatacggccgcggtgggcgcggggacgaacctgcgggaaggtcggctaaacgaccacctcgggggcgagatgaggttcccccgtcatggcgcgatcccccccatcttggggagccgtttcttctttcgctccccctcgggctgcggcatcggcacggcaccctccgggcgcctgctgctagcacgcaccgccccgccccctcggggaggagatgggggaggggttccctcctgcttcctcttcccccgggcgtcggcagggcggctgctccccgggcccccgtcgcggggcccaaaagcacgaccccctcccggggtagattgttcccccctgcggctcccgcccgcgccatcgtggccccggggggcccgctcccccgacgccccgaccacctgcatgatggtcaggatcttggcgcgctctggatcgcagcagagggggaggaccccttgggggatgagggatgcctccacggagctgagattcagcacccgttggaccaccatcctgaagtcctcagggtcccagtcccatttgcacccctggtgggtcctcatgtagtcctcgggcccggtgtactcccaggcgccccgggcgcgccgctggagcggcgcgatccggcgacgaaggtagtcgccgagcaccatggcccccgtgagccccagggatcacagacccgccaggcggtcaagaatggcgtcgtagccgtctcccagatctaccaccgcccgccagctggaggcctgcgccgggggctggctcggaagtcggaggcgcgcttcgtcggcgaggggggtgtagaaccaatcgctcttccagtcgtcccactttttgtggaggacgcagggaatgtagcggttcagcacctgcccccgcggctggaagtagcagccaccgactaccgtcggcggcgacaccggctgtacggtgaagaaccaccggaacaaccggagagataggcgcaccccaataaacatctcgcacaggtgtgcgaagatggccaacgtcattatcgcggtgggggtgaggtgcgccatctggagatcataaaactccagaatatccatgaaaaaaatagagaatggcgggaccagccccgccattgcgaaaaagaggaagaagacggaccgccccgggtactgtggcgccgggcgtccctcgcccaacgcgaccacctcccggccggtggcagattccggcatgaatcggcgcggcagcccggcctgcctctcgctcacgatgcgggaaggcggcagcacgctaccgtcgagcggtgcggagccccgtgccatgacgtcggcggaggaggagcttgagagcgagcgagtgcggcaagggtagggcacaggaaacgaagagttagggcacaagtggcgaaggcaaggggaagagtggcgagaggaaagaaacaaatcccttcctcggcgtctttacacccttgccaacgctatgcccggctcctcgcttcccgcgcccactacctcgccccctcgtttctcgcgcacacgcctccactaaacccactcgcccgtttgcggcgcacgtggcaaatgtgcggccgtggcggttgagatggggcagatcgtgcgcgcattaactacgcccgccaaccgtgaaaagcgccatcatcatgtccccaggcgaaacgaaccggctcgtcccgattcgcgcgctgctcgagtaatgtagcggtcttaaagaggccgctcattatcgtcggtcggttttcccttgccgatgcgcgcgatttgcgaccgctgggtttctgcccgcctgtagggaccggccccacctgtcaccgggcctaaggagtggcgtcacgcccgagcgcttccctcgaggggggcgatcgccctggcgtaacgccgggggctactgtcggtgacatggggccgggggtatcgtgactagaggcttgggtagccgcggtcacccacgtggcctgaccccctcgggggggtcgggcctgagggtgacgtggccacccctccctctgtctccccgaggggtcgggccgctcccgtttcggccccgagggctggggcgccccgaccccctgtggttttggcgccacgtgtgtgggttaggtaagcacagcgggctcacctaaccgcatttatagcaggttggacgagcgcgccacgccgcatttaatgcggcgcagcgagcgcttatccggtccgtgaccggtcgcggtgtgtgaccggtcacagaccggtcagatcgcgggttaggtggcaacaggcggcctgtcacacgcctcgccccgtcccgtcggaatgatgagagctacctggctctcgtccctagccggagccggcgtgctaactcctggagttggtatgtcagtcccggtcagatccattccaggcttcagcgcaagtatggcaaggaagtcgctggccattaaatgaaggttgaaatgggcgtccaccggaaaagcgggcgagcggggcaggaggcgtgtgctctgcttgtcaaaggtcacttccggctgtagactagccctctttgtaaaaagcatgtttcccttcttaggcagctagagccccatgtggtgacccctgaccagataaaaaggaggcccaggcctaggaagaggggggttgggactctggcgaggggattctagagcctgaactatctctcgctctccggctctctgtattccttcacacacagatccaccaaaacacaggagtagggtgttacgcttctcagcggcccgaacctgtctacgtcgcccgtgtcttgtgcactccctctctcgcggacgttcctcagatcgagggcgaagaacctcacttagcgcccccggccgaaccggcaaaggggggcctgcgcggtctcccggtgaggagccccaagctccgtcagcatgttataaaaaagtttcgaacaagctgtctaataaatggtgatatagaaagtgcttcaagttcttaaagaattgtaattcgagaaccatggcacagaggtcccgtttgaatgtaatgaagataaaaattaagtgataatacgtaaaataagaaagcccttaatgtgagattaattaagttgtaattattataaactaaataggtttatcttatattttaaaacaatttctacataggaagtttctgcactaaatacatttatttagcagtttgaaaaatgtgctaataaaagtcgaggaaaaaaatctgtatcttaatcaagttgacagttacacacatgtcaataagttgaaaagaatactccagcatggaacttgtcaaagggggagggggatctagacatctagtagtctcagtgttcagcttcaagtttataatctcagcgttcatcgctttcactacatatagctctattttaattactgttaaggaggcaagcaaagaaatctatgtaaaattaaacctttaaaatttagaatcagcatcagcaacagccgaacaagcataatcaaaagaggaagcgtgcgttagggtttggaatcgtgatccgggaccggggagtaaggtggtgtttggttggagggactaaagtggagctaaactttagtccctctcacaaaaatgccaacttgttgctgtgagaactcttttaccggtcgctttggtcaggcatccaattagagggtgtttgcaaccctctaattgcaaacaccctctaattggatgtctgaccaaagcgaccggtaaaagagttaagagagcaacaagttggcatgtcactttgtgggcaatcccaatcgcccaatcggtcacatttttgcgttgtttaaacattgccacagcaacgtcactatcgagaggtacaactagtacttctactactactatggataagcttgaaggaaaacggcttattggacccagttctgatatttattatttcgctccaatcctagcagcataaccacacctaattaggagatggttttcaatcatgcagaatgccatggatttgtggtgctttcatgccatcctctcaagtttttctaaaagttaatttgaccgccggctatcaagataatccaatggcaatcaaagaggtagatgagtggatcagtcaaaacatacaaaggttagtcctaatccagaaactatgaactttcactggaagcacctcagaaagaccaaatctttaccggtggtactttgcagagaggagattctgctttggaaccaaaattggatgcagatctacccaatgattgattctgattgcaccctaaacaacccaaaaaaaaaatattagccaatcacaacttttggcctcatagttagctgcaaaatccagtcacaacttttgacttcagaagttatagcagctgcaaaatccattgaagcaaatctccttacagagtactgactactgagtggtgctgaaaccaaagaaaatgctagtggggaaaggatgcctccacctctatttacatggtgggtacagaattagatgtcaccatgggcactacagttttaggtcctgtctgtttttctgccttgtaaaccagcagcagactgaggaacaacaaaacttgtgaattgtaatgctactactccaaatcccttgcaaaaaaaaaaaatctgcattagtcactaattttggaagtctcgtgtcactcgtgtacccttcagcagttcagctagttctccacgacggaattcatttctaccacacaaacattagctggcaaaaaaatcaccacggcagccaagaaactggatgtggttactccaaatccctgtacttcagaacatcaatcttgtccaaatcatatgcctgacaaatcctcgaaatggtatcacaatccaatccttcattcaattttctgctctcaaggaacccatcaagcttcttcgaaggctgcaaattctattgaagaaataacacaataagtatttcttttttcaaaaaaaaaacaaactgcacatacagtaaatatgatatgatatatatactgtcaaagcctaacaatctagaaggaattatcagtaggctagagtcacaagccactattgcctaacacccccaacaaccactattttcacctaactaatgaaaggaccatgtatgagaggaacacatattacaaacaagatcatcttatatgatacaaataatggaactcccctcccccatttcctccatagtagctccttcataaaatgttgtggacatatataaatcccgtgaggtagaggatctcaagttatgttgcagtaaaaacaatatcagattcagattccaacagcaaattacaacatgttgtggcaaaaattgttaaggtgactagttggagttgtgaagtaactggcaacctttttctgtgagccacaatgtacagatcctccgaattgagattacacatagatgcataactggctgcacagacagcctaatcattgttgtatataagtcaggcaagcttcaatgtgcccatcattcatcagatgtataaaaagttatattatataaaaaccatataaagatatattataatagctggcttcaatgattgcttaatgattgcaacatgaagtcaggcattccagaaagtgctcaccagttgtatgcaaatggagtaactattaaataatcaataactacaaataaatccatccatagtcgtggccacccatgtgtatgtgcaggttgggcatacaatgcatgcagttatgcaagggtacactgacatgtcataaacctcaaggtcaaacaaactgtgcctagcgggtaaaacaagccagcatatatgcaactgtgcaagtagataaattcttttaattggcatatcctggcttaacttgtttgtgcattatcccatgcggccacatgtcagaaaaggttgttcattgccttcgggtacatttgcatactagaggcagtaggtatgtgatagtaacacagattaactacctcaactcttcaagtatctgatctagaactgatgtagtatgtccgatctacaactctagttgaattaacagaaaataatcaagatgatgactccggaggtccataaatgtctcggtccaaaacttccctcaaaatacaacaatctgaaggtttaactcattttgaattgagacaacttacccaaggagcatattgagtgttttcacaagggttgccatcctttctggaactcatctctttctgcttctcaagaaggattttccattgatctgagctgtcagaaactaacaactggagcctctcacttccctatgtcaaagtaagtatcaaacataccttagcaaacgccacaccacgacagagaggagtttgaacaaaaaaaaatccaagagctgaaaactctataataactgggccatctaacaaacctgcagagctctccaatgagaataagcacgaaacagcacccagaaaaatggtatgtttggcaaaggcagtacctgcaaatgaataagtaggtgtataagaatgaatgtcatctcaccatagcatagtgagttaagtacggattgcacgcattagaagttttcataccaacatgtatactctatttcacaatcttttttctgctatgaatcctatggggtaaagtacaacaacacaagaaggcaacatacaatcacatcctttgatcaagtagattatgatactctggttaatgattaaaacataagaacctaccgggtcatcaggattcaagtaatgtgtgctaggttataaactagacatcactggagcacaatctcacaaaattataattatattgtatggctcattaactgaatcagaagtgtaaattatacctcccacatatgtaaaaatcccttatctttaatgtgtaaatgagctcatcatatttttcttaatttgatgtactaagttgaaaagtagaccaaacacaagcctcaactaatattgtgcgcaatctagcaaaggcagcaagcaaaaataaagatctaataatctttttagtttggtcaataattgatagcatcgcaaaatgaaaaaaaaaatcccttcaaagtacaacaaactgatcccactgaaatcactgttgcaaattgctagccaacaccattttttccaaagcaaatgaatatagacttaccatgaaaacacttgtaactggaagcaaacaaactgagccataaagaaatttcctgtgaactgatgcacccctggttctcagaaacattgcagaaacagaagggtgaggaaagatataaattgagctatacagtaacaaattgttggagcaggtccatcaaacactcacctgacagcaatatgccgcaaccgtcgacgcacaagacgaggatttatactgcaattaaagctaggattcagaaataatcttgaatagacataaaataagacatgagtaagaaaattgccgaccaactctgtctggtgatgcttgatagtgccagagcgattcataaagctcaatagctaacttctatacaaaaacaagcatatgcatgaggctttccaagtaacttacgaagccagtaaaagaatagttcgtgtgaacaagtcttttagagcttcttctgtgcaacaacaggcactgacacagaatctaccattttacagttacggagcacgcacagaggttcaaaaaacaagcagctacaagctgtgaagaattaagacatacatttttacagcagacttacaatacgcaaatcatgcaatttcttaggccctgtttggtagagctccaactcttaaatttagctccaggagttgggtctggaatggacccagctccacctctctagttcattttgtgagagcgctccacccagctccgctcccatttcaggtggagctgaaactgtttggctgagctccagctccaggagaggtggagctggagctgtgccaaacaggcccttagaatagaaggactttcaactactttgtcccaacaaagttcttgaataacagctatgaacagagaaagctggtgtgaattgtgtattggaacggaatgatagagatgtcagagtcaatgctcaaacttgatcagatataacccatgtatcgctacatgaagcatactgaaacttgtatatctaaattagtatctgctcagacattctaatagttccattcattggcgacaatgtgtatccgttaatgataaattgctattgcaagtaagctaagccactaacgacagatactgtatgatttcctgcacagaggctcagagccttaggaaatattcatcacaacaaggacccaaatagttgaatatcccaatcgattcgacaatcaaactaagaataacaacaaaggtgaaacgacacaaattgcacgcacattttatcaaacacaaacaccaaactcataagcagagctcaccttgccggatgcacgatctcgagtagggagacgtccttggtcaccgacttgagcagcacctccgacggccgcacccgcgagagcagcttcagcccgaagctacaccacaacaaagcaaaaaaaaaggggagcacacccaacgactcagcatctcgccatttccgactccacaggcgccacccgccactaagcaatccccaaacccttacactcccgacctgtggatccggttcttcatcgacccctccggcgcgctcccgaacccgatccacgcccggttcatctgcggcagccaaaaccccaccatcagaaaccccccaaatgcgggcggcatgcgagaatgcagttaaggcgagagacgagaaggcgctccccgtcgagtcgagcaccttgtccgcgacgaagtcgacgacggcctccgcgttctccgacgccgtgcggcccccgccggcgatgccgcgccagaggtccttgacggttggcggcggtgggggtagtagggcgcccccatcgccgcccccgcaagcggcggcgggcgcggtggcgcgcgggctggcgaagcaccaggcccttcccttgacggggaagacgacgacgcgggcctgcatcgcagacggcggcgtggagaggtggaggtcgtcgtcggcggcggcggcggcgaggcggaggcggaggcggaagagagtggaggggttcggtcgaggcggctagcctagtgtactagtctagtgtgatgactcccacgccgcggcggcggggatctcagccgttggatgcggatctgacggttggatgtgcctattatttaggagtatactactgatcctttgtaacgaaatgacagaaaacagcattgctttgttattaccggattgaagtgatccgaagaacagggcgcgctccagttcagtgcaaaatatatcaaacaattttttgtggtctttgctgaaaataatcatatggttaatgaatgttgatggatgaaatgcatcctggtaatgaaaaataaataaaaatcattttttcgctaatgtcaattttcgacgttaccaaattttgataaggtaagagtggttgtgtttgggttaataccttactaacttttggaaggatttttacgagtgaaaagtaatataattacccaaaaattggttgggttgagttgacaaggtacgtgtagttcactgctacctctgtcccaaaatgtagctacctagtgatgcccgtactaggtagctacatttttgaacggaggaagtaccttacaaaattttggtagtattaccacaatttgaaaggtcgaaaatgataagtgaaaaaacccaaaatgacagtacagcattgcctatttgctttataccagtttgaagtaatctcaagaacagattgctgtgcaaatacatcaaacaaaatttgtgatttttgctgaaacaatcatacggttgacggatgcatttaagcaatgcctccagcttgttcacaccactggtcttggtaatgaaatgacagaatacaatattacctattttctgtaccaacctgaagaaatttcaagaacagattggtccagctcagtgcaaacacatcaaaccaaatttgtggcgtcaccagcaagacctcatgtttgatgaatgaattcatgcaaggccacctgcttgttcacagcagggaatccatcttttgctgattcgcatggtagtttcagtgtctttacaaaaccctgtaacagcatccaaaatgaaacagcaccagcgagagctctgtgccttgcagaacaacaaaatcatcagattcggcacggcctcgcagaatcggcttgcattggactaaccaaataaccatactggaaagacaaaaaagataaaaaaaaaagagagggtaaaaacgagtttaagctacgggatgcagctcactaacatccagaatttacagagttcgtctggaagagtgagacctaaagactgctaacccttctctactacacaaagtcaccatctgtctagtcactaggcaatgtcaggccaagtaggaaaaaaagagtggcaggattagagcacaagcaggatgttggcagctctaagcgcaccctgagcatcagtcagacgggctaggtcccttcccgagcaatccatcgtctgctggaggagctggagtgtcttgaagagtctcttgttgagttgcagctggagcggttgcgatatctggttgggtctgctgtgaagtgccctcctgggtatcaactgcagtagactgtgtagccccagctggagtgcctggtgctgtgcctccatcagctgctggtggttggtcacggcgcctcttgaaatacttcttgcagaatgagtccccatgctcagggtaggtcttcctcacaaaattctccatgcattttaaataggagaaatctgaccgagttccatctgaagacaccacaaacaagcaccgactatcctggaacacttggtgcttgtcaacctgtcaaattaaatgaggccattgcacaccataagccaaacgaatgctatatttcattatagcgtatcgggcaattgcacaacaggtcaacccaaaagtaacaagagaaccataccattatgtgatcgatttcaccagacacctttgattgtttctcagggtggtgttcaagaacattctctttgatgaatttttcgtcttccggagaaagttttatgctatcactgcaaaattttaagtcaacaataaagttaaaaagcttaagacagtacaaatcaattaaatgtcggacctagcatactttcatataaaagccaagcctcctctattcagaaacttaaaagcatataactgtaaatcatgaatcacacaaaattaacaaataatcatgaagtaacttacattgattcacggaaaatctttctgatgctcagcacagtgggttcaatttctcctagaatcttttcctcctcagctgttaggtcaaagtgtcgccttggtggccccctctcatcaggtctcctaggcagacccctgccatcaggtttccttgggggcctaccaggattgtttctttggcccctccaattgccacctctggcaccccatccatctgatttccagtccttattacgtgactcattggcttcagcagaattccagacatcatccccttgggaaactggagcagcattccatgcactatctgatggagatgcaggcacattgccccaggattccttgtctttgttagttgaagcatcaactccagcagacttccaaccatcccaagaatcagattgctttgcatctgaactttcattcccttgggaaactggagcagcattccacgcactatctgatggggatgcaggcacattaccccaggattccttgtctttaactgaatcatcaactccagcagacttccagccatcccaagaatcagattgctttgcatctaaacgttcattcccttgggaaactggagcagcattccacgcactaaatgatggagatgcaggcacattgcccaaggattccttgtctttgttaattgctttgtcaactccagcagacttccagccatcccaagaatcagattgctttgcatctgaacgttcattcccttgggaaactggagaagcattccacgcactaaatgatggagatgcaggcacattgcccaaggattccttgtctttgttaattgctttgtcaactccagcagacttccagccatcccaagaatcagattgctttgtatctgaacttccattcccttgggaaaccggagcagcactccatgcattatccgatggagatgcagtaacattgccccaggacttctctgtagaagcatgagcatctgcagccacagtctcccaagatttgttttgcacatcattattattttcagcttcatcattgcccctgccccatgatcccttttgcgcattatctttctcccaggaacctccatttgatcctcttcccttgttctctttccaggagttcccatcattctgagtgctagactgcttcttccagctggctcctccatctgttgcccttttagggccctggacagaccaagcatcatgttgagctggctcttcagatattttctccttctccttcgccttttcagtgccccagcctccccaatcagaggaactcttttccactgtcgcaggcacatcccaacacgaattcccttggtttgctggttttgtgactcccgtgtcagctcctgcagctgcatcattccaacctccccatttatcagaatcatttccagcactaccattctgttcccagcttgcatttgttgttgtgccattatcccacgagctgttattctgaacatcttgctcttccaaattatcatcgaagatcggttgaccaatggtcccatccaattcaggagataagcacacatctgcctcgttctcttctgcaaggtagtccacatcatcaaagaatgtgtatcttgccttttcctcgtcagtacgcaccaatgccaagtaatcatacaggccatcaccatactccttattgcttttcagctgaaaaaaatcaattacaacaataagcagagctactttttcactaaaacgctaattcatttgattggtcacaccgtgcaaagatctttaagcagattagccccaattaaatagagtgaagccccacttcttatataatcaataagctccagtgggcagaaaaaaccagcttacctgactttcattccacagaatctgaaaagatgatccagtaccacttgcagcatgcttgccccaagaacatgatgaaacaacacatcccaatgaatccgaatgacatttctctgcagccttctcaaagcatttcataggggtctacaaaataaaagggccaaatcaataaaatgtatgtgatgataaaaaacaaaccaattgatctcagagataagcttacaatcaatgtggactctgtgaaaggtacttgaacttttaaggaacggaaggtggccttgtaaccagcattgttaaatccattcaggtttccagtaaatgtcatgctatttgccacaagtaccagatgatctttgagaacatctttagcgaccatccttacagttgttgaaagccgctgcacaattcagcacatataaaataatctattgaaatgagatgcaagataaaaatttataaaatgcattggacaaatccataagcacaaacatgatgtacaaaagagttcatcgtagaaatcaaatacaactcaattgaaatggaccaaacttgcccattaaaaacaaaaccgaatgttccaccagtcaacattctctattaacattaaaatcttggtcagacatggaaaaaaaaatgcaattatcgcattcacgcgtaaaccatagatagttccccaacacacctagatcaacattgtcaaacagctatttccacggaaacacagtagtttgtgaagcagaggtagccatagagctatcatgaaatactaagttcatatatttataaattttccttagtaagttcttgtaaatgcaagtggtcaaataatccattaaaaagattggaaagatctgcagcgtgacctgcaaacagcagatttgaaatgaaatacctcccaaacttacaaacaaaaagggtaaggtgacaaacctgcacaacttgatcaaaagcacatgagatgccaagaagttctcgcacttgttgaataccataagggattgatctccgtatatcaatgaggttcagaaccggtatgcaggcatccattgttgttctccaggcatcaccaatatgtaaagcttcctcttcttcaacaataatttctactgctggctcaccctttgatgccttctgtgtgtttttaacccaagatgttgcatccgatccaacccaaacaattttagcctcttgaattcgaggatcacctgcagagcaacattctcaattcaaggaaattgttgagctaaaagtactacccttatttggttaacacatcaacacttttttttttgtgacaggacaggagaacattaattttataacaataatttaaccaatagaatcagttaactaccaaacattaacagagaatgtcttaatctgttacagctgtggagccagcaggcagcagctttagcactaaagggtaccaatttgttcattatagtcccatcctttgttagcaggttatcctttagttatgccaggccatgacatcctattgcctcaaacagagccacatctctctatacaatcagatgatctttcccttaaccagctactctaaatccatccctcagtcagtgcactccacctagtgccattcaaccacaagccatcattgtttgaacccctccaatgaatggtttaccccatcatgaactaggtttgcaacacaataacagttatggttctgaaaatagtggtaacttttttgggggaaaaaaagaaaagtattatgaaagacatgagcgtgaaggaagataattgttttttaagggctaaaaatggatcaatcataattctttggctttttggaccccccccccccaccccttaaaaaacatggcaagatgtgaataaaggattttcaactgaacctaaataataaattgtattgaaaatgaaattccaacagaagcatattatgtacaacttacagtaccttttatgattgtattcaaaagcactccacatagagaatcagctaacacactgactgctctctccactgattcagatactatcatgttatcagaaacaaagaattgcaaacacggaagcttaggtagctttccatcaaccagcttctgtgtgaataaacaatcgctgccaagagtaagggtgaaaacttgagtacgattaaataatataatatcgtctcacagtaaacagataataattaatgctaaaaatgattaactgaaaatgaacttaagtagaatattgccaggaattgtgatttgaaataaacaatgcatcaatattctctgcctagacgatggctccattgctatgccaagctaccaatactttgctataaacaacatgaaaaagaaaatcaaaactgaacaatcttggaactaggaagcaaataaagatccccttacctctttcttatggctcatttctactacttcaatggagatgaaacttgcaagccaggtacagcatatggttgtagttgaggttaactaacttatcatttgatacagcgagcgacaatcacatatcataagtaggatttcacatcatcatgatgttgaaatattagatattgaacatctgattaaagagcaatgcagcacttgaataaccctagcaatctacaagatgacaaccctcttctaccaaaactataaaaccgccaacaaccatagcaactaatggcaggacacaaccacataaacaaaacagcagtgcgtgcaatttattcttcaaacgtgagatctcaagcaatatagtagagaatagatagttaccaagtagagaatgtaatatttttaaacaggttactgagatgtcctttcttcttcccatatttcccagaaacttcttggcatttctgaagaatatcttcagtgctaatgttgatcctttctaaatgtgcctgaaagaaagatgtacatatattatcagggcataataaaaacaactgtttgcatgcaagtattcaccaacataagaatatatcataataccctgtcaagatgaatatggccaacaagtgctggggctgcttctgaagttccatctaaacctatttgcttctggtacctgacaacgtgaatgttatatttaaggtgttctgctcaaatgataatgaatactaaaagccaacaatatgcgacaaggagacttttatctcaatttccatttttgagaatgatcaaaacttgcatttatctgggtactgtcgtgaccaatttctaagttgttttatggcagttccagttgcataatgatggacaatttcaagagtatataaatgattgaagtttaacatcaatgaaccaagtccatgactagttagtggacaatgaacactgatgtgcagatccatggaaaagagataccgggttctcagcattaaacagataaaatatgaatctattagggatggcaatggggacccggacatgataaccggcggggaataactctattatgggctgtaaatgggaggaaatcaccctccatggggctgttttaggccaaattgttcacccatcgggtgggctgggagcggggacgttctgcaggcccccggcccccgaatccccatggggccccaagtcaatcaggaaggtgcaaatccctttaagaccacagcccaaaaagtaaaaaaaaaaaagcatttagaaggcccaaatcagaggtgcatatataaagtactgaaaccttagcacagtccacatccactcttccttccactcctcccctccactctctcagatccaatcggcagggcaaccagaaggagcgagagcgactgcacgaagccacctgggcaaccagaagggcaacctctaggctgcgccactgtgaagcttcaaggacacaccacgtcactgtcgcgactaacgcgccgctgccactgccaatctatgacctcatactttgacgctgttggtgtttaagtatggatagttggatatgatctgtttgatgtttggttgttcaggcatttgtgtttggctaactagttttgttggttcgttcctggctttgttgctgttgtgctgtcatgttgctggcttgtagcttgctactctcttgttcctgttaccgagtgtggggacccaccgggtgacccatacctggtgcagggatggggacagggggaaacttgactgacccgtgtgcggggatggggatggggacgggcaatatcttgcattgcgggggtggtacggggtgctgaaacccagcgggtgcagcccagtttccatccctaaatatgataagacctaacccagtcaaacacactgtttgtgcaaacagataagttaacactaagttactttctagatccacataattttcagttcattggacagatattgaacatttgccaactatctacattctatatccgcaaaactttcacatttcaaaaatggaaagtattctgaaggaccaaaaaggaaaaggaaacttgagttttagactttggtataagaaatccagggaactacaataaaacaaccacaaaagaaataaagtccttcattgatttcactaaaagcaaagcaagcgaatataactacataccccagtaattgacagcattaatttatataccaatataattgacagcattaattatggatacttactcaatgcagatgtcagtagcacaatcttctaacgtaattctccttaggcagccctgaactgcaatagcagccttttccttgcaaaacttcttggcacaagagcaatcattcagaaataggataacttttcggtctttcatatcgtttttgtagcgacttgttgtctgaagtatttcctgttaggttaaaggaatataccaaacttatcatgcatgcatacaatattaccttttaccaatgcataaaataatttaatgttattaccttcatccgctcccatgaagtattgttactctgagatgcatccaagacagccttgtatgcagggttggagatagcagtcgcagccaagacaccaactggttcgccaggacctattgcactagggaagtccaaggcatcatcctccgtgtagttaagttgtatgatagacttgctgcagacatttcttactgtcccatcatagcatatgacgacatcccgcagtaacgccattagattcttaaatagtgttccaggctccgtcaaccccctagaggagcgaacaatagcttctcttgtcgaaatagcatgcaccagctcctcatacggattaaggccatgaaaatatgaactccgtacaagaccatatgcctctggagaatgttcttctctgacagctgggtgcttgttcacaaaagtgtagtagcaatcctccaccagacgacgtgagtagaacttcccctcacggtaaagttgtaaacccacaaaaccaagctgctggacaactttagacactgaagagtcactctttggatcaatcagaagtccaagatgagagcgtttcacaacaaaatctgaaatttgctgtttgatgtccttcaaattattatcaacacgcatttcaacaacctgattttctgcaaatcttgattgttcaaggataagagactgtttttcaatgttcttctgtgcttcttccaatagaaccttgggaacattgaagtcctggaggcttacactaaagccatccaaaagaatcaattccatcaataatggctgcagcacattcaaaaattgtagtgcttctcctggacccttaacagaaagagtggaatacactaaatctgagaatgatgtctgaacagattctttgtcaagatccagttttataatagtgctgtccctgactacgtgtttgtccccttgagaagttaaggcttttggcagagcaccttgcactatttgcgagattgtccagtacggctttgacttgatcacagcaggatctggaagagaacatgtaacaagcattgccagctggttagctgcttctttgctcaacattgttctggaagacatatgcttcagagcaagcaaactgtcactaactagctggagattgaccttgccactgtgcgaactggtaagctgcttctccacactgaaaagctccagtgcttcagcttttgcagcaagggactgtggataatagatgtgcacacaatcaccgtcaaagtccgctgcaaaaggtgcgcatatgagcggattgatcttgaccgtatggtcttcatggacatacacgcgaaatgcctggagggaatgcttgtgggtactgggtggacggttaaggaaaacaacatccccatcaacaattctcctactgatagtctgtccgactttcagggtagtgtgacctttggatccaacggtgatggcataggttgcctggccatctctgtaggtcaaacacaatcccttatccacaatctcttgcaacctgttaaggttgatgtctgttacctgctcttcgaaagtgattctttttgccacttcagaaggcagtccaatcacatctactccaatatatggatctccagtaagtacactgcgtgatgaaaaccctgaccctttgctgataaataatgttctcatcttctccagccattgttttgttgataacgcagaaggatcagtactgattgcaaatctcttggtgttgtcttgaggaccctgcaagacaacattaccgtgggacaaaagaaacaagactaaataagtgattgcacacaactactgggagagaacggttgtaaaacataaacctatggaagaaagctttaacatgaactaatagttgatgaatttcatgaaccttttcaggtccaactactatagaaatgttgtagtttcgggtttaatagctataagggagttcgataatatagttaatgtagggaaatgagcagttttgcttagtgtgtctatgatcatgacggacgtcctatgcaatatgaaattatgaattcactgacaatgcatgcatggtttgcatggctgttttctctaataaagggtgcacatagacgcacaatagcagaccgttcatcctcaatgataaccatccacagtgtatactcatgcacaggatcaacccgacacaagatcaacccaacccatatggatatgcttggtcatttgttgctatcttctgagagatttatgaatcaaaatcccttgtatgcatgtgctcagtcattataattatattaatatgaagtcaaatgtaaattcatatttttagtttggttactataaggagtattgaaattgttgtaaaaatgagcttaagtcgacagcctgtgcaaatgcagttgacaactagtcgatcctaattcatggcttggtgacaattacgattacaaaacaagtgaccaatttgtgtgtgagcagatgagctactctctggagcaattctctagctgagacaggactctcctgaacatgctctcatgtaaatatggtaaataaactatcacattaagatcatgcaacatacccttgtagtgccccttagatgtatgtactgggcaatagagagctgtagatcacatgattcaacttcatgtgattcaaagtttggggatccagctcttgacttttttatctgctctattttctgaagcaccttcttcagcagagatattgatatgtcctgatatgagaagcaagtataataagccatgacatagaattgaaccagtcaggaaaattatgaagaacaaacgtgaggaagaactcacataggacatgatgctctgcccatctgtaaattctggaatgtataaacaatttggtggcacggggaggtatttcatcacatatccagattgagcaatgtaaccacgagcagctagtttcctcttcgtttcttcaggaattttcttcaatatattgagagcctagcaaacgatacaggaatgacagacgatcatgtaggttgttggatatttaggagcttacagaagtcataaaaataaagtaaatgagattaacctcttccgggagcaaggtcctgcagtgggaggttccaccatggtgaaatccatacttgtcaaggaagttccatgagccttctgtcatgaatttcctaggaggcattttcaactctaaacgaaatgcaccatctgctgttttgatttctttcaaagataatgccggaagatcctaaagaagtaaatggcgatgaacatcagttgccactcatccggattgtaaatgtttatagtgtcaaggctagcatctaataaaaacaactaaagctgtataccaaaagccatacgctaaaaaactaataaaaacatgatatagtaatgcttatgtcatgattgttggccacatcttacaagttccaataacactccatcatacagcataactttgatcctgtgtactgttttcaacgacgacatgttactgaacaaacataaaactgaatacagtgctagtctgtcactcattctctgtgtagacaaaaaaactttgcaatcaatggttttattgcaaaagaatgcaacataaaacttattccgtaacttaatatataagtgaaagcatatgtatggataggattactgagtgaatactgcaacagctatgtcagtaacattggctatgttttgcccaagcagattttgatcaatttaaaaccaactaagctgtaacatccggactatgtatgagtggattaaacttaaaacactggtatacttggttcttcgagaggcatatgttccatattcctactacttatacatgtcaaacaatgaaatattatgtctgtctacttcaaggcagaagggatatacaaaattgttggggttggaaagtacccgacaatagtagcatgacaatgctgatgtgttatcctttccctctgtctgtttgacctgatacatggtaagatcacattaattataagccaaagtaagacaattggatttagaaaattaagacttagctgctttgacctgtatgtacctttcctttcttgacgcggaggcatttcaaacataccacatttaatatctgcctcagttccgttacatggcaagggtgatatataggcacaggcagctcaatgtacccgaaatgccctaaataagcagataattttggttttaaagaagagaaaagtggattgtcagttgctacagaacaatatcttgggcatgaaaaactaatgagaagtcatcatgtgagaaccttcgcattttccattttctgaggcaccacaggactcgcattttcctgtctccaaaggtaacccaaggaagggatttccgagctgactaggatgagtgacaggacagtcatttatagaataagtacgctgcaggacagaaaggtgtgtatcagtcatgttggaaataaaaaacatagtattacagtaggaaatataaatgggaactgtgcaggatatatccttgccatattcatgagaaacaaaaaatacaaaaaaaaagaaggctaaattcatatgaatcaagtagaagaatgcaacatcaagtatttaaatccacaaaatgtaaaacagctccgttagttagcgaaaaagcccatgtatcagcacttccagatgcaaaagaaaatgtcagatttcagtattaactaacaaacaacattcatctttacattgcaaaagtaaaggtcaaaaagaaaagctctcatagcaacactcatcttgataaaattaatcttacaaattcaaattttgcattgcgattgaatagcacagatcatgcatcataggtaaatctaattgaatgatatcaaatataaaacttgacctgacgggggagggagggtaagaccttctcacgcatgtcaagaaaaccccctaaccccccttacacagcggcacaggcaggtcaagaaaacccccgaacccttgccccacccttacacagcagcaccgtaacccgtgaaaataggctggtccttagacctatgctttggcgtgggacaaacgaggggattttttttcaaccccagcctgaaattcgctcccacaaggagtcgaacccaggacctgaggagtgctactagagccacctaaccaactcagctagaggtccattcgcaaatgatatcaaatataaatgatagagaaaaggagggtttctagatctcatcatcaagagtagttacatcaatcatatgctcccttatcagacggtactgtctctaatggatcacaatgaccaagttgtcgcttctgcatgcatctctttctgcaagcattgctggtaaaaagcatcagagaaggagaacttacaatctcatcctcagtggataggctaagcttgatgctcttgatggcaccttcagcaaccggaattgctgactggtcctcctccatctatctgaaatagacaaagggacatggctgtgtccgtaaaaagaattgaaaagaaagaaccggtaataccaacaagctagaacccaccattagctccaattaaacaacaagaaatagcagaaacaaacagaaaacagcaacctcaaattcgcaaacgtaggataaaaaccgctgtaattatttgttggcttctcggaaaataccactccaaatcaaacttgcttttgattttaatcatttgtttccttttcctaatgggtgcactaacaaatatattcccttagagagtgtgcccttgtctccaagcaagttaattagggcaaagtggctaagctaatattaggttactcctaccgctgaagctgcatttccttctgtttcatcttagctctagcatcctactacgacccaccaaaagtacacccaacaacaggggaagatccaaaagtacaaacaaactgttacttgtatcaaggttaaggctctgaaattaagagaaagagcttcttccagatctagaagagaagctagggttaacgaacgaacgcgagcaaattccacacaaaagcactccaggtggtagagtgagagatgaatcatcagaaagaggatgcggatgctcaccaggatcccctcccctcccctaactaaaaaaacatttcgcacaatcatcaggattcgtttagattcccagcacaccacaaacttccccccaaacccacacggattactccggtgaacatttatcatacatgagatagaaccccttagttgggaaacaaaaaggcatatcaaagtgcaccaaaattgaataacccacgcctctccgcacgacccaaatcttcccttccctcggggaaacccaaaccccccacaacaagcgacgatgaacagacaaacaaccaaccacatcccctttccccccatttctgcgagtaacccagcgccccccacattgcggagacgggatcagagccctcctccccctcacctgaacacccgcgcgcgcgcgcgcgcctgcctgcctcctcccaccctcgccctaaaaccctagccaccgcgcggggggtgggggcggagagggttttagcctgcagccaagccctcgcctcggagaagccgagaagggaacccacacgagcgcgagtgcgagtgcgagagcgaggcgacgatggtggtggtgggaggtcaggtctcaggtgcagttcagtgtgcaggtcaggctaggtcacccccgcgcgccggcggctgttcgacgccacgtcactgacatgtgggccataggctggtcgtggcgtaggtgggacccacctcgcagtgagtgtgggggtcaccgggggtcacgtgttgggagctgggaggagagagatggggggattgaccggaaggcattgaatgggatgacgtgtagcaccaactgttgggtgaagccagctgatttttggccattctttgatttgggtggtttttggcagtaaccaatgtcataaatgggcaaattatcaagcgccaaaaatgaacacaggcctttacacaatgccaaaagaaaaggtgacacgcaaaaggagtagcaagcagtatatcatttttgcatggaaaaaatacagagagctagaatgaacgaacgaactcaccaacgtggctgatagaaatacgatgtcgttgatggctagaccaagcaggatgatgttgagtagtcatgagaagcatgtgaccatagtaaatagaagggactcaaaaactgagccaattcgatgaaatagaagtcaaccaatgtatctgcatcaatactcaactagcattaccaagataaatttggacgctaaaaaatgttgagacgagcttgcccgaacaagctttattgtgcactaggctatgctttctcgtgatctctcacttatcaacaatacacaccatgagggcttgacgatgattatcattgaccatgaggatgagttgtgtcatcacctcttcgtcgtaactcaaaaagacgataagccaaccacctctttgtccaagattagggcatctctagtgttgcattgattagttcagtccatgcaaacgaacaaaacttatgtttgatctctgcagcgtataaatcgttttgtgggacccagtgggactcacacacgtgcacagtctcggccttacccacgtcttcctctttctcacgtagcccgatgaaaattgtctgtattcacttgtgtttgacacctatctaaaagacgattttctcgctgacatgcacgattcggctctcgtagtgtgctctgctcgatatttcaatgtaaggtttgatttaatcacatgatgttggagtaaatgggctaggcccaatttattcccaataaattccattggctcacaaataatgttatagaattaataccaccttgaaaatttaagtggagatatctcaacttaaatagagagctattagagagcacatgttgaccggttgaggtgatggtgggattgccatatgcgcacgcgtcacgccgagccgggcacaggtgaggcatcacctgcctgcacgggtgctcgggacgagcaggcctccgaaactccatccacttgtgtatctgcacgagtaggcaggtgatcaagttttgggggagcatcctccggcacgactactttgcatcaactacgtcttctgctacactgcatccactatatcctctgctacgtctacttcctcttcgtcgcgtgcgtcgactacatcctctgctacgtctacttcctcttcatcgcgtcgactacatcctctgctacgtctacttcctcttcgtcgcgatgtcttccactagcaccagcgttgctggagacgaagagaatgcccgcgcaccaggaggaggagggaacggtggtacaggagagagcatcaacggaggcaatactaatgcctgatcatccagtggatcattctatgggtatatatctactctgatattggtgttaaacatgttgctaaatgtttttatacctgttaacatattcatattcatgtttatcactatgctaggatcgctgtatcttgttttttttggattaaagtatgccgatttattaccaaatttccaacaaatgatgtgcaaaattatgcacaaagatgaaaatgtcacctccattatccaccaaaactcaaatgcatcatcgccactacctttacgcctcttagctaggcgacaagccaatcacccctctatccaagctcaggaggatgatgagcaagaagaagatgcgaagctatatagagaagtgagaatgtcaccagaaggctccaatgtgtcatcacctctacctccacgcctcttatctagacaacgaaggagagcacggacaaaggtgaaaagtagatgggagcgtctcaccattgctacacaacaaacaaggccataagaaaggtaggtggtaagggagagcgctgccaccacttggtttgaccaagggaacctagaaccatcgaagggttctcttatataccaacgattggtttggtttgggcttctcggataacgactctttaacgacccaaaaggccagctagtaatttttgtcccttttttaaaaaagaatttgtggtaaaagcccaaatactccaacaaactatatgcatactacgttttgtgcctcgtgcaactgattcatggagacaatgataggttgaacccacatagcagtggcaggtaggtgggtaggtcgttaatgatgttgttttcactctcatcatctcatggtaggaggaaagtacgattgtccgaatttttattaacagcttgaggttttgatacagttggaatatcttgcgatatttatgacttattttccatatcatctcttagtgcaagaacatagaaatatagtgttacgcttccaagcgacccaaacatatataaaccacttgtctactcactcctatgcacaactcaagcacgagctcggaacatgcatgaaccctagctgaactctcaagggaggccatcttgccttcccactagaggagtaccttgctccaacatgactaaagattgaatgagtttatgactatacatctcatagtcataggttgggaccgagggaacgtggactaaaaagccaacgtttatgaggtgaatttcacttgtgtattatgcataaagtagaaaatcagaaagaaaaatcacgagtgagagaaaggggtggcatcacctaatgtaatcccttcatttttaaatacacgacgttgttaacttttagacattacatttgaccatttatcctattaaaaatttagtgcaaataaaaatttaagtcatgcttaaattactctaaaaaatatgtcacaacaaaacaaatgatacatatattgttttagtaggatgaatgattaggcatcatgtccaaaagtcaacattatcatatccaacagtatgttaacgatttttcatgcaaacaaatgtgaaatgtcactgttgtatgcaacatatagttatgcagtattgagcccgcaatagttctattgaaatttccaaacacttctcgcaacatatccaatcaacaatctcaacaaaaaattcacatttttaaacacctggtccattgtcactcatttgcctcatcaaggcccttcaaatatcatgtagctattgtcattggcctttgatacaccagtctcagctttctacatgccattaccatttctttccagaaggctgctacactccattaccatttctcaggcacaattctcacttgacacatttccagaaaaggagtttcagataaggatgcaaatgggccagtggccagccacggatcgacccgcttaaatgatttataagtgggtttacgggtcagcccacttgcatttcggatcgtcgctaaagtgtcctatgaaacaaaccaactattggggagcgagcccattgtcatagtcactgcccctccttgttccattctgcaggttcctctcaaactccctcaggtaatcaagaagcaaaacgatcacgaacaggatgaatccaccggcagagttgctgccgcctccacctccacctcctcctcctccaccgaaccggaatggcgggaagccggtgcctccatcgtcaagctttggactcctcactttctctgaaagcataaggtcatcgaattaagaagtgagaatcccctaaaaaaatgtaagaagtgagaaactgtgagcaaatgcagtgaaaacatagctgttatgtacaatgagattcagttcttggaggaggaaaggactgttatgtacaacgagattcagttcttggaggaagaaaggacgaacatcatggattttgcatttttgctgatgctttgcattacctttaactgaccctgatggcggtgaggtaggtccagagaaagatttgcgtcgtgcagtctgtgtctggtttgcgcaacatgttattctctgcagaaaaaaaaaagcaaattcagaaacagttagtgttaggtggtttcagaccttttgctggttagaacttcgtgtctgcacttctaaatttagaagcatcatgctgcacagcaacttaacattgaaagttattacaaaccatagctacttaaactcatgctgttgctttcttaaaaacagcacgatagtcgcctaataaaacttaaactcatgctttgtgaagtgatgagtataatcagaattcaagctagcaccagattgaacatgaaaagattaaataattagcagtttggaatttgttttcgcttcacctatcttaggtctcaattctttttctctagctaaagcctgaagctctgaaagtctagttaaaattccctatttttgcaggagtgatttactttttgagactaatgattactccaatatgaatagttgaagaatatatgttccgtgaaatggaccaaagtgtcacacataaataacatttttttaatattaaaagtacagctgggagaaagcactctttcacaacatcacaattttatatgagatatacatctcttgtgttacaaaaatccaatacttttaaatctgtgattttttttagaatatgcaaggagcgcttctttatatataaatctgtgaaatgtccgacctattctaatttcatgaactagttcaagttcaaaactttggatttgcactgaagcctgaagacatgaactttctcagctatcagatttgctgatgcagtcatacctgataaatgtatttctgagaattagtatattataaccaataaattgatctatgaagcttttgaccgtgtaaaactaaaacacaagtatgacgagcaggcatgtcatagcaaaaccaagaaatattctacttaaccacagaacagacaggcaggcacgtcctcaccatggatgcttcgcatgaagaaactgctctggcagaaacgctgagtttagtcttgagagatcgtgaagacgagatagattgtccttcctggctttgtcctacattgaataacaataagtttatgctcatactaaagcatcatcacctaatattaaattacattctgaaatagtactcatctctctttttccttacagcactttatgcgattgacaatatatcagtagcaattcttcttttttttccctttaaaaattcactcttttttagaaaaaaaaaagttcttgcgagacgagtgcagacagcatttcttgggtaagacaaattaagggagaccgattatattaccaacctccacgatttctcccaatcccctggtacacagcgggggtcaacagaagaagcgaacctggcgatgacattgtggcaagtggaggcatgatatgcagcagctgtgtagacaaaaaccactcctcaaaaaccactcctttctttctgagctgagctgtagatacaaccaggcactagcctgagcaagaaaactgcagaaagaaatgggagaagttcagaacgagattgcaggtgcagtacagaagaattggtgcaagaaaatcatgttgcaggagaggaggagattacctggattttttagcttgcagaagtgtgtaatttgcaaatccgcaggagagaagaagatgagagaagagatagatttgggtgggaaattggggttttggatgagagaagagtgcagagtggcagtgacatgcggctgggacgtttggcaacgaatgttatccgtatagactctggggtcaggtcgcggagtcgtcgctgatccgcatcgtccaaaataaatccaagggtcaagaacaaagcagagggccagcgaagcgaagagcaagatagctcggcaagacatctaagatgctacttcgatgatcctcctgagaacgatgtcgatgatcctcttttgaattacagtaaagtgtatgggttgtacttacaacttgtagagatgtgtcatttatatttctaaactcttaaaatacatatccaaatcgcagaacttgtcatagtgtgtcatctaggtctcaaatcaccacagccccttcaaaatcctacgtggtgctgatgtggcatgccacacgaacatttaaaaattttcactttctttttttttctctttttcttctccttcttttatttttttcctttcttctcctttcttcgtgacccgagcaaaagaaagggaaaaaagaagaatgagaagaaaacaaaaaaaaaagaaaagaagaaaaaaaagaaaaggacacgtcacgtccacgtggcatgccacatcagcgtcacgcaggatactagaggggctatgtcaatttgggacctagatgatataatttgacaagttttagaacctgaatctgcattttaagagtttgaagacctagatgatacaaccctataagtttaaaaaccgccaacgcaccttactctgagaattatgtgctacgcgtggctcgtgcacttccctgttagcatgagccaattattctagtacagataatttatactcattcatgttgtttttttaatatattacacaactataagttcgaccattgttcttattcaaaatattagtgtagatattaaaaacataaaatatagtatttaaagtacacaattaaattacaacaacataaaaaataattacataatttttcaaataaaataacttatgtccaaaagtcaaacgaacaaagagagtattttttttacataaaattaatgtaataaattcatttcaaaatgttttttaaactcatcgtaaaattaaagctctcaaaagttagtcataaatatacacaatagtgtaatgtttaggacttaaatccggtgaacaagttataccaaaagaaaattaatcagctgagcgctcactgacttcagcttataattatgcttttgattacatgaacgaagcttttttttttatggagagagtatatcaatttcatttttattttcaaatacactaatacaacctatatatttttcaaatatataaatttctctttttaaaatctgctctgtccatttcgtattataagtcgctttgattttttttactattcgaacttctttagattcaactaagtttatagaaaaaactacccaatatctacaacatcaaattaatttcattgaacgtaatattgaatatattttgataataagtttgttttgcgttgaaaaatttcattattttcttataagtttgactaaacctgaagacttaaacttgtttttggagaaaaaaaatcaaaatgagttataatataaaaaataaaactgtttattacaacaaaaatagaaactaagggtgtgtttatttcacgacaaaattaaaaatttggttgaaattgcaatgatgtgaaggaaaagttagaagtttatgtgtgtaggaagttttgatgtgatggaaaagttggaagtttgaaaaaaaagtttggaactaagaccctatttacatgggactaaaacttttaagtccctatcacatcagatgtttggacgctaattataaatattaaatgtagactattaataaacccatccataatcttggaataattcacgagacgaatctatttagcctaattaatccataattagcctatatgatgctacagtaaatattctctaattatggattaattaggcttgaaaaatttgtctcgtaaattagcttttatttatgtaattagttttgtaagtagtttatactatttaacactctaaattagtgtctaaaaatagataacaaagttaagtcctgatccaaacaccggcctaatgatgaaagtaggtgtacagttacgtagggtaggaacatcatatttgctactgctattgctacccctgtggaacggccgccgtcgtcaccgctccacccacagtcgtcacctcacttcaacgctcgtcgtcctcctccactcctccacctccaacctcctcgcacgccctccctccctccataaacataaaagccctcgcgcacccacacgcccttgtcgtttccattccacccttccaattcaacgcccctacaatggtggcgcccatcgacccacctcgaattcgtagcgcgaatcctcgtctcccaatgagcatttaatcggtcccgttccgttcgccgaggctgcagtgagctgaatcttttgcattcttgccttcttggcttcttgctgctggagaagaaggagaagagcgcgcgctccccatgccgtgcgcgcgcgccgaggacgcgctgccctccgccgccatcgccgccctcgagatgccatcctccgccgccgccgccgcagcagcgtgagtgtgattgttcttgaatctttctttctttccttttttttttgttttgttctcgtgttgatttggtttccatcttgttgctccctctgaatcttgctgaatgctgggagtgatggtttcagaggcggtctgatccagaaggtgggcggcggccggagatcgggcgggtcggggcgggcgttgcatcggtcggcgcatctgtcggcggaggacgacggccacgcgccgccgccggcgagctgcagcaaggttcggttcctgtgggcttctggttgactcgtttctatctccacagcccctgcccagcatccagacatcccagaaattcacattctttgttcggattcggggacaccacggtttgggaacactcggattactggcacagaaaagcgagatttcaacggcaaatgcccccgcaaaagcggtgtccttttgcgaaatgccgtggtgcgcagggcgctgtcggcttcggctggccgtgcctgcaaaaattgtttttcattgggtcccccccaaaccaaggatgaactgtcccctaccccatttgtctccactttccattaatcgccgcagactgtgtggtcaaccaacaatcttgttgtttattgcttcctgggtttatttctgccaatcgaagtaatgtcacagcaatcgtcgttttcattgttgtttttgtaggatgataagatcggtggtggtgggaagagagaagggagccagaggagcaggatgaggaagtacaggtcgcagctcgagcaggaagtaagaacttgctgattctctttattttgtggccttcttctacagactacaggcagatgatgttagtgtgtaaatgtgatgttctttatactatcgaaaattgtgcaggtcaagaaattacagaggcagctcgaagaagagattgatttgcatgttgcgctggcagacgctgttatgcaaaatgctggacctgtactgaactcctctgtgaagattccatacaaggtgaagagctactagctagttttcttgtctttatggaatgccatttctgagccaattcagtaatttttgttttgaccttttcattctccaggcacaagaattactaactaacattgcctccttggaaagtgccgtatcgaagcttgaaaaggacttaaatgaactatattaccagctttgtcatgaaaggaatgaaaggttacttgccgaaagtaaaccagggtgcttgccatctacatccccagatcactcattgtcaacttgcacgtgcacatgggaagaagtaagtttttttttttttttaagtaaatatatctgtcttctttctgatgttggagttattgataccttcttgttatctttcttagcacatatcatcattgagagatttaaagtttggaggatctgagtcaatgaggtcaacacaacaagatttatactctgaacttgaatatgaacaagatgttggagaagatcctgaggagagacaaatggtttctctaaatagactatttgaaaaacaccgggatgtttctttaaatagacttctggaaaaacaccgggatgaagaggtccttctcatgcctatttgtatagttttggaagatagttaattgtgctagacatattcgtgcaaggtttgatttatctctctgcagatgcaagaatcttgctctactgataaagaaggcgaagaagatgagaagattgatactctatcatttgaacaatccatactaaagataactagcatgaaattagggaatctttggaacaatcctaaccagctctcagaggagatggttcgttgcatgagaaacattttcctccgtctatctgaatcctcgaagatgttaccaaaggaatcttctgattgttcatcttcctcagcagaacgtctttctggttctacactggcatccttctcagattcatccatcattccctcaatgctacgaagtccttcagttgactcgaatcgcaatgatgagatgacaactgaagccagcaactttgatccatataaagttaatgggaaggaaagccgaagagatattggaaattatcattcagcagctgaagtatcttggatgtctgttggaaaggagcaacttgaatatgcatctgaagctctaaaaaaattcaggtttgatgctgcaacctaggctaaaactgcctgtcctaatgtcaaacatactgcatgttatgaggttcatatgaagcatgtttttttttgaaacactcgttcatatgtatgatactatcagcatactatgcacatttctaatctcattttactgttgatgcctaagtgaatttacaaacaattgaactgttatgaggtttgtaccgagggaagaatgagatgcttcttgtaatcttttattttcaggaaacacaaaccgtattatattttatattttggaaccccacaacttgttgtcatttttagccctgaaaggaatccctggcagtgtgtaatttatccatatttgaatgtgttaacgagcactcttttccatgccactttgacttatctttgatgtatgataaaactttcaaccccaatgtcttgctgatgagcaaacaaatgttaacacatactcactacatctcataataaatgttttctttgcgacgctttccaagttttttggtctattttctgtcaattacggtgttcctcattgaagaccatctttaattcttactaatacttatgttgaatgtaagtgtaacaaataaccatgcctttgtatttacagatttcttgtggaacagctatcaaaggttaaccctaatagtatgaactgtgatgagcggctagccttttggattaatttgtacaatgcactgattatgcatgtaagtatgttaccaaagagactggctttgcaaacaagtcctgcactgatgatttatgcatatttctgttcctcatatttcattttgcttttactacgtatttctttctcactagactaatactatatactaaattttctgtactggtttctatcaggcatatctagcatatggagttccacgaaatgatatcaagcttttttccctaatgcaaaaggtttgagcaggatctcttctctgaacaaaaaatgtataacactttcttcaatatggatttcaattaacacgtgctagcgatgcaggcctgttacacagttggtggtcagtctttcagtgctgctgaaatagaatttgtgattctaaagatgaagactccagtgcatcggccccaacttgtatagctttttctataacctatttattttccatttgcttataaatcataacgcctctcattggtgtccctacctttctatagtccttgatgctagctcttaacaagttcaaaattactgaggagcacaagaaatactcgattgatgggacagaaccccttgtgttgtttggactcagctgcggaatgttctcttcacccgccgtaagtatatgagttttatcattgttttcatgtaaatatgtgtgtattgtactatttgttcagcaaatattgcaatcgccaagtgcatgtttctgcagcaaccattgcgctaccaaacaatattgcttgcttcaaatccttgttcagatgctatagtaacatgttctttcaatgacgtttgaacatccacactgtcgtaactattaacatatcaagctgttattttccttttcctctttttatttttttaacaatcttgtgatgatctgccgtcatacaggtgaggatcttctctgcagcaaatgtccgtcaggagcttcaggaatctttgagagactatgtccaagcgtctgttggtataagcgaccgagggaaactgctaatcccaaagttactgcagagctatgccaaggggaatgtcgaagattctttgctcgctgactggatctgccatcaccttacacctgatcaagttgcagtcatccgagattcttcttcacagcggaagcagcggcttcttggagcacgcagttttactgttgttgcattcgactcaaaattccgctatctgttcttgcctgacagcagtggctcccagaagccagaacccaaacggacttcgtgagctgtgttcagaaaacacatgctatgagcgagtatgtttggtcctagaaccatttcttgcatactggacaatggagtagctagttgtatatgatgtaaatttttggaggaagagtatatgatgcaacaaagatgagaagctggagggtgatacaaagagctccagtaaggatacaggatagttcatatgtatgatcagattatctcagctgaattggcgatgaaggttcatctggatctcattttgttctgttactgtctttccataatgaagataaccttttgtaatttttgttttcgacatacctttttttgggggtatagttcttgatcttggtcaattgatttgtaagttgtgctctaaataatgtatagtgcttttacctctttataataatgtgagttactttgtcactgtctggctgttactgctggaataagtaaccgttctatgagatgcaacctttgtcagatagataaagtttatgccttttttattcgaaatgcttggaatttacaaggaaaagaaatggaatcgttttgaatacaaacaatgttggcaataatcactttttttttttgggagcaaaaaccataacccttattatcatcatacattggagattttgccccctttttgtaaggtaatagctcaaactgctcgtcttagggctagtttgtgtatgcagtgctatattgttacaatgatatttaagaacttgttttttttttttcaaaacctatccttctgaactccattataacttctgcaaagataaaaaaaccaaaaatattaaactaaaatcttgaaatattaaacgttatattttatcaaaggtagccttcaaaatcaacaaaatttatgttatccctttcaagcaactcacctcaattacatgtggggccaaacccacttatttttccagcttgtctttttttagaaaaaaacatttcaaaaaatcctttagacggggcttttaactatttgccactcttacggatgttgcttaacgatttgccactagggcccacatgtcatagacacatgagggctcgcatgtcattgacagggtgtggcgaatcgttaattgccatgtcacaagagtgcaaatagttaaattacattgggccaataagtgggccgggctgcccaagaggcttgggccatctcctctctctcctctcctccttcacgccgcgagatgaatcccccggcgactccactccagcgccggcgaatgccgccgcccgccggcagcggcggcggcggtggcagagccgtttgattcccccagaagtttgtgcgggggaggcggcatccagctctccactcccagggtcagttgattcatccgcgctttttttttccttctgctcgttgctcttcacaccacagtgatctgctgagccgggaggggtaggagtagtagatcggctgttgctcgggacccgtggagtgggatggattgcgttgagctcatgccaaattgagacatgaacatccttgtgattttgcttttttcagaaacatttttactagtctcaggttccttatatatttttggggtaattttggtgcccatatcagttcacgtggtattattagttttccttgccacttccatcgtaataatcggatcagtaatatgattcacatatttggttatattgtaatcatgtattggtctgtcacttattatgttcctggcattctgcctctttaatcatggtctcctgataatgttgtgaatctgccttttttttttttgagtaaatttcattaaaccccacgtattatgatctaagttgcacaaaatcacaggtattttggtaagtggcacataaccctaaatattatggttataaagttttacaaaaccacatcgttaacattttgacatagtcctatatcaaaataaagaaagcgaatctaacatttttatgttggataaaatgcttataaatttgagatatgattgtagaactcaaaagtgtgtgctagattaaagtcaaaataattattaatgtggttttatgaaacgtttagactgccatgtgtcaaagttcttgtggttttgtgaaacttggaccattatagatgaggttttacaaaaattactccttttttaaaatcaaaatttaatcacagaataatttgctgaacgaaaaaataggtttggatacaaaacagtaaaaaaatggtaatctatggaggactgtgcaaaaaggaagtacacaaatattaattcttctgctactatgagcttctctgtgcacttcaaaagtttaagtgcatgatcatcatgtgctatcatattctgatttaattgagttctgttgtttgcagctcagtgcctatgatgtctaggcaggagactacctctcgtatagttggtctcattccaggattgtggttgacacactggcatgcaacttcaagtaccttcagcatctgctcttcatgtcctgtgcctcggagtgttggatccaggacctcaatctgctttcctttggatctcatctcctggacccactcgatgagttcttttgatgcagacaagactggaatgggtcgcctcccggtgagtagttcaagcaggacaaccccaaaactgtacatgtcacctctcagtgtagccatccacccttgcccatactctgggggaacgtaaccaagagtgccaactagttcagttgtgacatgggttttgttgggaaggatcaatcttgataacccaaaatctgcaacataagctttgaattctttgtcaagtagaatgttgctggacttgatgtcacggtggactatgtttggcttacaaacatcatggatataagcaaggccctggcttgccccttgtgcgatcttgagtcgcattggccaatcaagaaatgaactggcatcgttgtccctgttgtgaagccaatcgtccaggctaccattctccatgtaggaatatatgaggaaccttgagtttccctggatgcagtaaccccacagtggcacaagattatcatgctgtgccatggagagtgcatcaacctctgcactgaattccctttccatcagacacatgtcactattgagcttcttgatggcaagcattgagccatcagatagctcacctttgtagacaagtccgtaacctccacaaccgatgatgttctccttgtcaaaattttttgtagccttcaggagatcagtgaatgtgagcttggtttgctccccctttccttgtggtaccatcaccaagggttgttctgaattgaggttggacgatggtgcttctgtcccatcattgctgtatctcctgtttttgctcaagaaacttgtgctcctcaacaaggtaaggagatgagctagcaagacaaggatggcaattcctccaaagaacacaccaaatgtaactgcaagaatggctttcttgatgtgtcgttttttggagatgtatgatgtttgagctgaactgcaatggtttgcaagcataggaccacataattttggattgccatcaaagatagaacttgggaatgtgctaagctgacctacagttggaactggtccttctaggtcattgttagaaacattaaatgctgaaaggaagtgcaatttgttcagtgcttcagggattgtaccagtgagattattgtttgacaagtcaagcatctgaagatttgtgagattgcagattgattctggtatctgtccagacaatttattggagctcaaattgagtaaaagaagtgccttcaactgaccaatctccttagggattgcgccagcgaagttattgatgcctagattgagcactttggggaaagcactgtttattcggtactgaagtgattgggctgtaaaaattggcagctcaaagacttttggtgcaacattgtctgtttttagcattggcatctccattaatgctgttggaatttctcctgaaaggctgttgttcgttatgtctagatagaagaggaagtttaggctgctgatccagataggtatttgtccagttagttggttgtcatgtaaaaataacatctccaaatttgtgagctttgataaccaatgaggtattttcccagacaatgaacaaccatacagggaaagaacctgaagattctcaaaaccatcaatgctatcatctaaaggtatggtttcgtgcatgaagttgatcgcgattatcaaggttgtgaggtttttggagctctgaagcatctgaagtgtactggttatatttgcaagagagttcttaacaagtgacaggaatgataaggacttcagattacctattttctctgacagctgcccacgaaagttgttgaaagataatcgtaatgcagttagattgctacatgagtaaatgctttctgggatcgtcccattgaatttattccacacgacatctaaagtttttagattgggtagtgtggagaagttaaccttggtgagctccccactgaagttgttcttttttaggtcaatggttacaaggtttgtgcagtcactcaacgttgatggcagctcccctgacatgttgttgttgtccagatggaactcctccagtctcttgagctgtcctatggaatgtgggatgctgccaatgaacttatttcctccaagatcaagggtgaccaaatttatgagcttggtgatgccgtcaattgatccttctaactgattgttaggaaaagagaggtgcttcaaagaggtaatatcaaagatctcatatggaatagccccagtgagattgtttttgccagagctgagcaatgtcagtgtggaacaattactgagccctggagggatgcccccactgaattggttataactaatatcaagcaaggcaaatgatggtgcactggcacagaacgaagttggtatcttcccagtaaagctgttattgctggcgttgagcgctacgagactcttcatcacctcccatgttgttgatggaaaatttcctgtaaacaagttgcttgatatgtttagtacctgcagaggccggtcatgggtcgaagatggcagatcgcttaagtctcctgtcaggtagttaaaactgacatcaaggatcatgatgctgctggatgacaccaattccagtggtaagccaccagacagtgagttgtgggacaagttgaggcgcatcaagcctatcaggttgccaagggaaggtgagatgatcccctcaagccctctagtagccagaaacacctcattgactgtcctatttgggttgcaggtgatcccttcccatacacagcagtccgtgccattcttccatgacatgcccaggccaccatcctttgaaagccaagcgagaaactggatcagggagttgctctctttctcggtgcaagaactggtgggagaggccaagaagagcagcagcgcaagagcaagaccaaaggaagttatggggaatctgttgctgtagttcttgttcgagaactggaggggttgcatggttttctccataacctagcatcagagccaatagtttgaagaagaatgatcatgatatgaagggaacaagcagctgctgcctcttctttgttttatcttctcaggtcaaaatcaccacatttatgagtcaggactaagctgctattggttagatgtgacatcactttccaaattcactgttcacaccagcaagctgctatagtctactggtaagtctgacttccattcactaatggtttggtaatacttataacagacatccatgattcggccattattgaacttttgtagcgtgcgttaatttactcgatatgacaattatacaagtttcattatgtttaacttttgctattggcataaacatttaagactaacaaagatgaatagaaaaaaaaatccctttttgctgggcaagaaagtggctctctcaaaattgcaaggagctaaaagagtttcacgaaaatgaatgagcccgcaagcattgaccataccaatgaatatttgtctgtaactatcagtatatttcagcatgtcaggtaacttttttttctcgaaaatatgtcaggtaaggatcaaaaagaaaaatgtaggtttttttttcacaaagtggttattacagtcccattaggccatcaccaagaataaaatgtttatccatttgcttcctttttttttattcgctaggattttttttttctgagaatatgttagttttgtgctctctaagaaaacaaacaacaaattgattcatatattttgttactacatggtaatcatgtgttgagctgtcacttattaaattcctggtatttgcctcttgaatcatgggctctcgataatgttgtgaatcttcgtgttgtttatcgaattctaactacagaatagttacaagaagggaaaaaatgggtttgaattacaaaatagtaaaaaaagataattcatgagagactgtgcaaagtacagtgcaacactcagcttctctctgcactctaaagtagatcatcatgtgttatctaattctattttaattgagttttgttgtctgcagctcggtgcctatgatgtccaggcaggagacaacctcttgtatagttggtctcattccaggattatgatttacacactggcatgcaacttcaagaaccttcaccatctgtttttcatatcctgtgcctcggagtgttggatccaggacctcaatatactttccttcagatatcatctcctgcacccactcgacaagttgttttgatgaagacaagattggaacaggccgccttccggtgagcagctcgagcaggactactccaaagctgtacatgtcacctctcaatgtagccacccacccttgtccatactctggggggatgtaaccgaaagtgccgactagctctgttgtgacatgggttctgttgggaaggatcaaccttgatagcccaaaatctgcaatgtgagctttgaattctttgtcaagtaaaacattgctgcacttgatgtcacggtggactatttgaggcttgcagacatcatggatgtaagatataccctggcttgctccttgtgcaatcttgagccgcattggccagttaagaaacgagctggcatcatcattcctgttatgaagccaatcatccaggctgccattctccatgtaggaatatatgagcaacattgagtttccctggatgcagtaaccccacagcggcacaagattgtcatgctgcgctgtagagagtgcgtcaacctctgcactgaattccctctccatcagacacatgtcgctgttgagcttctttatggcaaccatcgatccatcagataactcagctttgtagactagcccatatcctccacaaccgatgatgttctccttgtcaaagttttttgtagccttcagatcagtgaatgtgagcttggtttgctctccctttccttgtgacagcatcaccaaggtttgctccgacttgatgttggacaatgtttcttcggtgccatcgtttctgcatctcctgttctcagtcacgaaattcttgcccctcaagaagagaataagacgagctagcaagaacaggatggtgatacctccaaaaaatacaccaaatgcaagtgctaagatggctgtcttgttatgtcgctttttggagacatacgatgttttatctgaaccacaatggtgtacaagcataggaccacacaattttggattgccatcaaagctagaattcggaaacgtgctaagttggcctacagttggaactgatccttctaggtcattgttagatacattaaatgctgaaaggaagttcagtttgttcaatgctgcagggattggaccagtgaggtcattgcttgatatgtcaagcacctgcaggtttgtgatgttgcagattgattctggtatccctccagagaatttgttggagctcaaattgagtaaaagaagtgcctttaactgaccaatctccttcgggatgacaccagtgaagttattgatacctagattcagcacttttgggagagcactggttcttcggtattgaagtaatggagctgtaaaaacaggcaactcaaagacccttggttcaacattatctgttttgaacattggcatctccattaaggcttttggaatttctccggaaaggctgttgctcgataaatctagatagaagaggaagtttagactgctgatccagtcgggtatctgtccagtaaattgattattatataaaaataacaccgccaaatttttgagctttgataaccaatgaggtattcttccagacaacatacaattggccagggaaaggacctgaagattctcaaaaccatcaattatatcaccctctggcattgtttcttgcttgaagttgcgaccaatgagtaaggaggtgaggttcctgcaactctgaagtacctgaattgtccttgtgatatttgtaagagagatattaacaattgatagaaaagagaggtactgcagatttcctattctctctgacaactggccatggaacccattgtaagacagccgtaatgcagttagatttctgcatgagtagatgctttctggaactgttccagaaaaattgttccaaacgacatctaaagttttcagattgggcagtgtggagaagttgacattggtgagcttcccgctgaagctgttgctcttgaggtcgatggttacaaggtttgtgcagtcactcaaagtccatggcagctccccggacatgttgttgttgtccagatggagcttctccagtcttttcagctgtcctatggaatctggaatgctaccaatgagcttatttcctccgagatcaagggtgaccagatttatgagcttcatgatgccctcaattgatccttctaactgattgttaggaaaagaaaggtgcttcaaagaggtaatattgaagagctcatatggaagggtcccactgagattgtttctgccagtgctgaggaatgtcaacttggagcaattaccaagccctggagggatgcctccactgaattggttattactaagttcaagcaaagcaaaggatggtgcactgacacagaacgaagttggtatattcccagtaaagctgttggtgctggcattgatcgcgacaagactcttcatcacctgccatgtggttgatggaaaaattcctgtaaacaagttgcttgatatgttcagtacctgcagaggccggtcaggggttgaagatggcaggtcactcatgcctcctgtcatgtagttaaaactgacatcaaggaccacgatgctgcttgatgacaccagttccagcggtaagccaccggacagcaagttgtgggacaagttgaggcgcatcagacctgtgagattgccaagggaaggtgagatgaccccttcaaggcctctagaagccagaaacacatcagtaaccatcctgtttgggttgcaggtgatcccttcccatgcgcagcagtccgtgccattcttccatgacatgcccaggccaccatccttcgagagcccagtgagaaactggatgagtgagttcctctcttgctcggtgcaagaactggtgggagaggccaagaagagcagcagcacaagagcatggccaaggtaagtcatgtgaaatctgtttttgtggttcttgttggaaaaatggaggggctgcatagttttctccataggctagcatcggagccaatagtctgatgaagaaggaacatgataggaagggaacaaacagttgccatctcttctttgtttgatcattcaagtcatagtcaccaaatttatgagtcaggattaagatcttattgactaattgcagcatcgctttctaagttaactattccccacccgccactacagtttattggtaagtctgacttccacgcacaataattcgatagtacttgtagcagccatccactgattcagctattattgaactgtttttatcatgacctaatttatttgatctgacttctaccagcttcatcacgtcaatttttcgctgttttaacaatgacaaaactgaacagaatatttatccttttttgatgggcaggaaaaacacatccttttttttttggcgaaaagaagggacctcacagatttgcaagatcggattggtgaggtacatgacaaacaacatcattcagaaaaagaaaaggagcacatgttttgaagcagtcatcgatgtcaagatccacatgtgtacgggcatggaaagaacggattaatggaggaaatatttcccagggctctctcgttgaccctgaggcgtttacttttcttgccgttgtcagcatcaaagctttggttttggttaacatctaagttgcaaatggcaattggtttacgatggttttggcctttggactgcgactcttgaagtctagattagcagcaatgctggaccagactgcagcatcattagaggggctgagaatcgattagtcaggttaatggcagtgttcatgtgatcattagctggtatttcagtaaccagcaaaaagattgcttgcatttgtcttttcctttggcagataaggagtacttctgatgttgatagaatatgctgtttctatggctatgataatgtctgtcaaatacaaatgcagaagggcacaagtggctatcattaaaaatcaaagttacaaggagttaaaaataagtttcaggaaaatgaaggcggcagcaagaattgaccgtactcttttcatttttatctagtacttcctccgttttataatgtaagggtttctaacattaaccacattcgtatagatgttaatgaatctaaacacatatatttatatgaatgtgggtaatactagaaagtattacattatgaaacggagggagtgtaaattttgtctgtaactatcagtatgttcttttgccgggtcggccgaacgaggcagaccaaatttcattatggtaaaggagaatgtaaagaactataagcatattccagcatgtcaggtaatgaccaaacaagaaaaatgcttgtatggaagatattatatcagcttttggtccgtcactttcacagatcggtttagatacacagtcccatcactatgtgttaagttctctcttttctctaagaaaatgtgccaatatggctgtgtgcatccgttttgaatgtagatccgagttttaattcattttttaaaaaaataaatgtctggacagcatgatagcaaaatcgaaaagaaaacgagacaataaaaattaaaggaaaaggctaatgggctcacaattcctggccaactttattgttacagttgattagtcgatcgtaaaatagaaaacataattagcatatagggcttagtgccataccaaaacattagtaatcaatactttgggctctgatagctgcagtcagcaaaccaagcctcctgttgcaactacagaaaattagcgcgcgttaggttggttggctgcagttgcactgctacagccaacaataccgatcaacctcttggtagggtaaaattcttagtaatgtgtttggattgataccaattaagagtcaaattttatgttatggtgaagaaagttttataactataccaaattaagcatgtgcattactatctattcggcttcaaaccaaaccatcatatttactattcaaactaacaaaatattggcatcgcacattttggcatcatccaaagtggcccataattagttgaatattaactgttaaaaaataaaaaaagttttatttaataatttaagtaaattatatatataaattttatttttaacaaaacatatcttttaacaatttttaaaaaaacttgctaatgcgttttagaagttagaacagaccctagtataatttttatccactcaagtcattcaaagtacggtgatatgagtgggacctactacaagtaacttgcactgtgaagcatgtagctcagtgtgtgtgtatatatatatatatgaaaatgattctatacacataggagtacgtacacctgctcccatctaccgtccatcgtagcaagccccgataaagcccggatgcaccgaacggatccgttttcatttttaacgagaaaaaaaatccgtaatctcaattaacccgtggtaatcggaaaaccggatcgataaataccagctcattgggtgatctcgataaatcagttatcagtggagagctcgatattcggaggggttggcagcgatgcgacgagggcaggatacatcgttgatttggtgtccacggcgagtcggaagcgacggcgtgatccagagtatcataatatatatatatagggaatctaaagcattaaatatttttccttataaaaggaatcataataaggacttgaaattggtggaaatgagcaagtagtactttcttcggattccgatccagagtatgttcccattcacttgttaagaaaatggctatcaagaacgaattaaccctttattccttttttctttttacatacccctcgggcaaagaagaataggacaaaaaaaatatggaatgcaataaaaaaaagatctttatttattctttccgtagtttatccatattcatacaaaattcttcatgaactaatacccaactcttttcgtttattaattgttataacgagtgttttattccaagattaagttattgctgaacaaagaaaaagtaccattatattataaaggatgagatgaattccgaagcgttttttatcattctagcagacagaattcctttggtctaatttaggacgtttatatatatatatatatatatatatatatataatctacttggcatgtgaggaacgccaaatatcatgacactgtgaatggcctcatgccctcatagtatctctgggagtatctttggctcactggacgatgggcccaggactggttatctgcttcgatgctcacccgtgcagaattgcacacgtgttgctcccaaaaattggagtcatctccctcagctccggagacggcgaccggcgagcggcggcggcgtcatggtccctcttccgagcagcagtacggacatcgccggacaaccgagggtaaggtcagtttactcactctccgcgcgttcgcctctctgttcgttcgtcatgtgaggatttcgcttgctttaatgcgctgcgggtgtgggggtctagggtgtttctttagggttcgtggtgggtggggggcgatgcttgttgcaaacatgctcctccgattgatattcgtcgcaaaacgttgaacgattagactattagaggttgtcgttgcaaacgggagtgggtgaaatggttcctgccctaacattatgccctaaaaagtgatgatgaattttggtgtctcgattcatacccctgttagcctttgtttatgcgcattcttgtttcggtatttataccctggcattctggtgaaaattgtgatgcatccttctaatcctctattgccacagtttcctttttttttttctttgcacccaatcaaggaagaagcgtctactttttacaccgtcaaattgccgagtttgcgtggtacctttgggagagggcatttgtgcccctggcccgtgcaatttacgaacatgttattctgcaatttgattcatatttgaggagttattttttgaataataaatgggatcctgaaaactaacccacctcgaattcaaatttattcgagatacgcaaagaacattctgaggatggatgatgtgtgttcataacctcttaggactttttttttcatcatggtatacattttaccctgataaagggagaaatgaatctgtcaaaaagctgtacaaaggattagactggagtagtcattcttgcaaattacatgtactatgtgcactggtatacaagataatcctgtataactgcatcctatcttaagttttgactgaattttgcatctgcagtttggcgtctatactgtccaagcaggagactacttcctttatagtcggcctcatgcagggattacagttgacacacttgcaagcagtttctagcaccttcagcatttgctcgtcatatcctgtccctcgcagtattggatccaggacctcaatctgattcccttctgatttcatctcctgtacccacttgacaagttctttggatgaagacaagatatggacaggtcgtcttcctgtgagcagctcaagcaggacaactccaaagctgtaaatatcgcctttcaaagtagcaacccatccttgtccatattcaggtgggatgtagcccagagtaccaactagctccgtagtgacatgtgttttgttggcaaggattaatcttgctagcccgaaatcagcaacataagctttaaattctttgtcaagtaggatattgctggacttgatatcacggtggatgatatgtggcttgcaggcatcatggatataagaaagtccccggcctgctccttgggcaattttgagccgcttcggccagtcaagaaatgtactcgcatcatcgtccctgttgtgaagccagtcgtctaggctcccattctccatataagaatatataaggagccttgaatttccctgtatgcagtaaccccacagtggtacaagattgtcatgctgtgccatagaaagtgcttcaacctctgcagtgaattctctttccatcaggcacatctcaccaaaaagcttcttgatggccagcttggtgccatcaggtaaatcggccttgtatactagcccgtagcctccacacccaatgatattctccttgtcgaagttatttgtagccttcacaatgtcagcaaaggtgagcttgtttttacctcccttgttttgtgatactataactaatgattgctctgaatcagacttgtgcgaagttgcgtctacatctgcattctcgctactcctgttgttggttatacaatctgtaccctttacagtggcaagaagatatgccagaaatagaagaacagcaattcctccaaagaagacaccgaatgcagttgcaaaaatggctttcttgttgtgactttttgtggaaatggatgctgcttgttctgaacgacaactgcgatgaagaatatggccacataactttgggttcttgtaaaagctagaatttgtgaatgtactaaactgggctccatttggaataggcccttcaagatcattacaagaaacattaaatgtagaaaggaagtgcaggttgttcaatgctgatgggattgcacctgtgagatggttgctagacaagtctagcacctgcaaatttgtcaggttgccgagctgctgtggaatttctcctgataaattattcgaacttaaactgaggatgtcgagtgatttcaactgaccgatgtcttgagggatcacaccactgaagttattattgcttagattcagcacttttgggaaagcactggttatccggtattgaaagcccgctgcagatctatatataggtagctcaaatacccttggatccaaacgggtggtattcttctttgttattagcattggcatctccattaaagaagctggaatcccccctataaggctgttatttgataggtctagatggaacagtgactctagtcttttgatccaaggaggtatagatccactgagtcgattatctagcaaaaataacatctccaacttttctagcttcgacagccataaaggtatatttccagacaatgagcaattagctatggaaagaaccttaaggttctgaaaaccatcaattgagttatcttctggcatggcttcgccatagaagttggtcccgataagaagggtggtgaggttcctagaatccttgaggatccatagcatgtttgtgatatttgtcaagttgttgcaaccaaccgataagaaagtaagggacttcaaattacttatttttggcgaaagctgaccttgtaaattgttactagataaccgaagtgcgaccagattggtgcaagagtaaatgctttctggaactgtaccttcaaatttgttgcccatgagatctaaagtttttagattggacaggttggagaagttcacattgctaagattgccgctgaagttgtttctcttgaggttaatcgttatgagatgtgtgcagttgctcagggctgatggaagctccccagatatgttattatcacccaaatggagatcttgcagccttttgagctggcctatagagtctggaatccatccggtaatgttattcccctcaagatcaagagttgacagatttctgaggttcactatgagtgtaccattaattactccattcaactcattatttgggaaagagaggtactccaatgaggtagcgttgaagagatcacccgggagattcccgctgaggttattgtgaccaactttgagcactctgagcttcaagcagttaccaaaaccaggggggatgctgccactaagatgattataacagagtgcaagcgctgtaagggatgctgagctgctgcagaaattactcggtatgtgtcccgtgaagctgttgttgctggcattcagcataaccagattcttcatcatctcccatgtggcagatggaaactgtcctgtaaacgagttgctcgagatgttcagtacctggagaggccggaccggggtggaagacggcagctcatgtatctctcccttgaggtggttgaagctgatgtcaaggacggtgatgctgctggacgccatcaactccagcggcaagccaccggacagcgagttgtgggacaggttgaggcgcagcaggccggtgaggttgccaagggacggcgagatacgcccctcaaggcccttggaagccagcgagacatcggtgaccgtcccatctgcactgcaggtgaccccttcccatttgcagcagtctgcggcattccgccatgacaccgcgagaccgccatcgttggagaggccagagaggaactggaggagggagctcctctcctgctctgtgcatgagctggtgggagaggccagagagagcaatagcagcagcgcaaaggcaagattgaacctaaggaaatctatgaaacatctattgctgcacttcttgcatgaggaatggagttgctgctgcttctgcatggcctccaagcaaatggtgcctacgcctgattctgattggatgtgcaaatgaaatggacctgatgatgctttgaggaagaggaggaagaagaaaacaaagcaagctgcttatgttgcagtcgtattcacaatatagaaaggaggattgggtcaagaataaggtgtagtggccacacatccacactgttgatgatgtgcacaattgccagtaagccactgcaggtgcagcttcctggttcacaccatataccagcacgtttcagttggagctgcctgccacaaaattttattaaaaatgtccaagtgcccaacctttttgtacaaaaaattgttgtctgcttttgcaatttgcatcctccctcgattatgtgattgttcaattggtattaaacaattgttttggtttacatgatgatatgagatgatattatatagtatgacatgtgttctgttcaccaactttacaatgacatcttttcagatactgcagtatgaagtggtaattgtttgtgctactgttgtcagtgttggtcattcccactcccactcacttggttctctgtggcctctgctccacttataaattattagcattggctaattgattcgctgtctctgtctgttctttttttatcccagaacaaatcggccgttgctaaaatttaaatattagataaatcttaggctatttttaatgtagttttttttttcaacattaacttttaagtcagtaaggatacatatataaaatgttttattcacattacttgttagtcgctaataaatcgtttggtatttaggtagttcttggtcaaccgatggggcattatggattgtgtaagttgattataatcgtgtcatttagagacgccaaagctatagctagtcttttttccacgcaagaaagggggtacagctagtttttgaccaatcatttattaacgattccatcctgcgtctggagagctcttgtcctatatgtacatgaattgtttgttggtcagagagataactctagaagttcagattgctgcgtttcaacaaaaatgttcagaatttcaggttgccaagtcatgataacatgtggccacggaaatggttggacaaattgctgcagtagagtcaaattgctgtacatgagttctttttaacgaaaattgctatacatgagtagatatgcattatgggactatgccactgaaagtctgaaatagttcatgtaaacatccaaaatttttagattgggcaatttgaagaagctggccttgcctcatctccgctgaaatgacaaacaccacagttaaatttatgcaatggatgggttaattgactcaacggttactcccacagtttcagtaagaacgtaggatgttttgattttgttttaaattaaacttatttaaatttaactcagtttataaaagaataaagccaaacaattactacctccatttcatattataagtcgttgtgaccatttccttgtcaaagtttgaccaatattataaaaaaatattgcagcatttccaatacaaaattaatctattatcaaaatatatccaatgttatatttaatgaaactattttaacattatagatgttgttatatttttctataaatttgatgaaacataaaaaaatttgacttagaaaaaagtaaaacaatttacaatatgaaacaaaagggtatatcataaaaatgtattcaaggttaataaaattaatttggcattctagatattactatatttttttcataaacttaattaaatttaatttttttccaggtgtcgaggatcgtctcgtttggcgttggacatctaaccagcgctactcagcgcatttggcataccaggctttcttccatggccaacattcctttgcctgtggtgatcttctctagcacgcaaagggttgctaaatgcaggttcttcttttggtttgctttccagcagcgctgctggacggctgatctcctccagaagtgtggcattgatagtcactcagcctgccctttttgcgctcaggatcttgagacggcgaaccacatcctcctcgactgtgtgtttgctcggcaggtctggctccatgtgctgtcgcctcctggctgggctgccctctctccccccctgtggcagctggttccaggactggtggtcgtcctccagggcctgcttacctgagcatctccggcgctgcttcgactccctggtgctcctggtctcttggcagctatggaaggaacgaaactctagggttttcaactctgcgctctcttcggtctcagtggttctggagtccatccacccagagggctatctgtggtctttagctagcgttgccgcttttggggacttgttgggagtgtagagtggctcgaccccttcctgctgcttggagtttgtatttagccgccgtagttttaagctccaacttcttttttgcttttttccccttccctctacataagccggtctggctgattgcgtcgtgtaactataactcttttcttctaatatattgacgtgcagtctttttgcgcgttcgcaaaaaatttaaaattttttacttgggacaaaacccaaaatagaggaagtagattaatacagagcaatcaattgtcacgcacgacgcaccctaagccccactattttaaccgtccgatcgtccgtgtacggtttggatcaaacggtcgcgggagattcatgggaaaatttacgtggaagccctcgaagttctctccattactacttctgtccctttttatgcccttactgagttgggccggaatacatgggcctcctccagtagtcgaggtggtcgtttccatttgggcccaacacgagacaatcttttcgttcttctcacagactagcggcggccggcgggggaggtcaccgcggccgccgccggcgacggcggcggctgcgggattgctcctcccggaccgctgccgcgcgcccgcgatgcccttgaactgttctacgacaatgccagggctggcctggtcagagtggaggcgcttcccttccctgtgaggtggcgcactcagggtgttcggcgaaatgctcgagtaacttgtaccgggcggcagcgagcgtggccataggcgccggaggatgacgccgcgtgtgtgcgttccgcaatgccacgctctcttcacgcgcgcgagtcaacctccttcgagatggttagtcgttctgcattctcttcccactccatactagtgcctagcatttgtgctggtcttttatccacgcatttcacagccaactgcaaatctgtaatcgtatctatacgtctgacaatacctagtatcttcacttgaatgggaaccattttgatttttgcattgaaaaactcaaggaacataacaatttcctcacttgtttcgaccttttttcatgcctgtgcaacctgagaatgaacaatgtttaataaacagggaaaggaagacgcattacatacccactttctaatgtaaaaacaagtacagtaaaaaagggaaatgcctcaaaatcacactagcctgtcacacgctgtacagaacgaactataagatcaatcaaattctagttctagtgaaaccagatcaactctgttcacttaaagtacaagattatctatcatattattgcatctttaggtcagggtctatactgtccagactggctactacttccatcatagttggcctcatcaaaggattaccatcaacgcacttgcaagcagtttcaaggacctttagcatttgctcttcacaccctgtgccttgaagtgttgaatccagcacctcaatctgctttccctctgatatcatctcctgtacccatgggacaagttcctttgaagtagatagtattggaactggcctcctcccagtgagaagctcaagcaggaccactccgaaactgtacacgtcacctttcaatgtagcaacccatgcttgcccatactcaggggggatgtaaccgagagtgccgactagctcggttgtgacatgagttttgttgggaaggatcaaccgtgataatccaaaatctgcaatataagctttgaattctttgtcgagaaggatgttgctagatttgatgtcacggtggacaatacgaggcttgcagatattgtggatgtaagaaaggccgtggcttgctcctttcgctattttgagccgtcttggccaatctagaattgtgctggtaccatcgtccttgttatgaagccaatcatccagactgccattctccatgtaagaatatatgaggagcctcgagtttccctggatacagtaacccaagagtggcacaagattgtcatgttgtgccatggagagcgtttcaacctctgcactgaactccctttccatcaggcacatttcaccattgagcttctttatggcaagttttgagccatcaggtagctctgccctgtagactaatccataacctccgcatccaatgatgtgctccctgttaaaattatttgtagcttccataatgccagtgaatgtgatcttgtcttctgcttccttgccttgctgcaacattactaacaaatgctctgaactgatgttggatgataatgcttccgtgtaatcattgctgcacctatttttggtcctgaaactcataccactgatcgaccaaaggagataccctgacaacataagaatgacaatggctccaaagaagacaccaaaaacaattgcaagtatgaccttcttgttttgttgtttctttgagatcaaatgtccatcagctgaactgcaatggcgtacaagcataggaccacacagctttggattgccataaaagctagaatttgtgaatgtatcaagctgaccaccagttgggataggcccttctaggtcattgtatgagatgttgaattcggaaaggaagtttagattgttcagcgcagctgggattgtaccagttagattgttgcttgacaaatccagcacaagcagatctgtgaggttgcagatcgactgggggatatctccatataatttgttaaagctcaaattcagtgaaaggagcactttcaacagaccaatctctggggggatcaaaccggtgaattcatttttgcctagattgagcactttgggaaaagcactggccttgcggtattgaagtagtgatgcagatatatatatgggtaattgaaatgctctacggtccaactgtgctgcagccctgtctgaccttagcattggcatctgtaataaggacatcggaatttctcctgtcaggctgttatttgatatatctagatagaagaggaagtttaggctactgatccagtctggtattggtccagttagtcgattgttgtctaactctagcacctccaaccttgagagtttcgatagccatcgaggtatttttccagataatgagcattcacttagggatagaacctgaagattctcaaaaccatcaatactgccatcaggcattctttcattcatgaagttgtggccaataagaagggtggtgaggttgctggagctgcttaatatctgaagtgcatttgctatgtttgtaagacagtttcctgcgagtgacaggaaggagagggatttcagattgcctagtccctttgataactggccgtgcagcttattggaagatacccgcagagcagttaggttgctgcatgtgtatatgctttctggaatttcaccactgaagttgttccgcataagatctaaagtttttagattgggtaagttggagaaattgacatagatgagctctccactgaaattgttgttattgaggtcgatgattttcagacttgtgcagttactcaagtttgatggtatgctcccaaacattttgttgttgttcagatggagttcctccaatctgttgagctgacctatagactctgaaatgttaccactgaagttgttctctccgaggtcaagggtagccagcttactgagtttgacaacatttgcccattcaagtgtcccttgaaaatcattgtttggaaaagagaggcactctaacgaggtagcattgaagatttcatcagggatagtcccactaaggttgttgtggccagccttgaggactctgagcctggagcaacttccaaatccagggggaatgctcccacttaattggttataactgagttcaagcacagataagtatggcgagttggtgcagaaattagctggtatatgcccactaaagctgttgttactgacattgagtgcaaccatatttttcatcactacccatgtggatgatggaaactgtcctgctaacaaattacttgagatattcagtacctgcagtggccttgcaggtgttgaagatggcaactcgtcaagatctccatccaggcggttaaagctgacgtcaatggtgatgagactgctggaagacaacagttccttcggcagggcaccagacagcaggttgtgagacaagttgaggcgcagcaatccagggagattaccaagagacggtgagatgcgtccctggaggctcctagaggccagggaaacatcagtgaccgtgctatcttggctgcaggtgatcccatcccatttgcagcaatctgtaccatcctgccatgacgcagcgaggccgccatcttgagagagctccctgaggaacctgaggagggagctcctgtcctgctctgtacatgaactggtgagagaggcgaggttgatgagcagcaccagggcaagggcaagaacaggtatgggaaatttgttgctgtgtttcttgcacggagaatgaagtgggtgcatggttttcttgtgaatctagcatggaaacttgatgctgagtttgtatctaagtatcttcactgggaaaagcatcagatggttatatcaagaaagagcatcaggagtaagaaagagtgtctattggttccattttattttggccttctctgacttggggaatgcatcagatggtcatacctagaaggagcatcaggaggaagaaagaaacgtctataggttccagtttatttcagccttcttgtcattgtcatcacaaataaatgctggtcaatgatttgatgctatagtatatgggtactcattaagatttaggacctcacaaaaactgtcagtgcagttttgttcgtcgcactatggcgttccagtagcggctgccagttatactattggaaagtcaacttctcgacattggcggccgtaagtaattctctccgtagccatccttaatttttaaccttaatcacgttgacattgttacaacatgccttagtttacttgatcaggcatgacttctcttaccagcttcaccatggatctcttcggctcttcgctagctattattccggaccaaattttgacacaacgattgaactgaaggatgctgcatcacctttattcaacaggaaaatgcactgtatttgcgaaagaacaaaaataattgctgaagatttgtaagttggagagatagcactacatggaattaaagcgtcattccaagaagtgtatatgatttacagcaatcatcatgcatcggcgtcgcggtcatggtgtgtacaacaacaatgaacaactggtgagtggagggaccaaaactgctgctcccttcttcggcttgaatcttgaccgtttacttgctgactctgttgttatcaagcgtgcgctttggtttatttgctccacacgcttgcagttgttttccgctttccactagtatataatgtaggttttcgctcttatgcttatgcctatgtttatgaactaaaatttaaattttaaaattattcttatcttaaaattgattttgtggttttatttatcatggtttattttttttgtatcactaagaatataaaaattttaccattaaattatttttttctttgctaataaacgttacgaatagacgtaagataagcgaaacgatggatcacgagcataaaatcctaagcatgtgatggatgggtggatgactagttaactcagacgatcacttatgtccttttttgttttttgaaatgagattataaactgattcactgggctttgatctattgtcagataccttctctgcatcccgccgccgccgccgtggaggcgtggaggtgtgattatttattggagaatgggcgcggagcggtgaacggtcgccttaccgagcggtggccatctggtctcgtttcaacggttcggatcaagtcgcgcgtgcgagcgattatataatacttcgtccgttttataatgtaagactttctaacattatctacattcatatggatgttaattaatctagacagtatgaataatggtagaaaatcttacattatgaaacggagggagtagtaacattttgcacgtgagcccttagactactgtgcattcgtgcttaagggctccttaaggaatgagccctttagttttttaggaattttagagaaaaattagcatgaactcacacctcctggaagtctttgtatcactcttttctccaaatcctatagcgttttcatgtgaagcatccaaactatatgactagacaattcttgtgttctatgatttgacattatttaggatgagatggtattataccgtcctaattcctttgttttcctgttgcctgtgtttttgaattctgctttttaaagtcgttccgggtaggatcactaccaatagtagcgatctgtatgctgcttggatcaaggttacaggcaacctcatgatatttctacttagaccatgttttttttcttcaactctaaattttaattttctcgatttttgttagtacgtgttttaaaatgttaaataatgtgtgtatttgttaaaaaaaatatacagaagttgtttagaaattcaagtaaaactattttttttttaattttatgatagttaatatttaataaatcatgtactaaaacatttttctcgtttcgaatgctttgatttaatcattaataaagctctctctttcatgtaaaaaaaaaattcccagcagctacgaacaggccattaggaatttaggattccttggactttttttttttttttgctcttctttgagttgggccggaatacatgggcctcaactcctcaagtggtcgttcccatttaggcccaacacaatccacaggcattcgttcttcccccagaccggcggcgacaatgtccctctctgccgccgtcgctcctcaaatccctccggcgagtggcgtgctcgcggctccgtatcctgtcctggcttccgccaccacccccgcagcgctgcgagcttgctcctcccggcccgtgcctggcaactctgggggaagggtgggccgcttccctgtgtatcggcgcgctctcagggtgttcggcgaaatgctcgagtgtcttgccacgggcggcgggtgaccgtggccgtagaagagctcgtgcggttgagaatgtcgatcagggattggttggtgctgcgtgagttcgtgctgctccttcgagatggttagttgtgctgcattttctttccactccaatactccatgctagtgcctatcgtttgttctggtattttatctaggttacaaccaactttagtcatcatttctagaatgcgttgagcggaaacaaatggcgggcagcagctaaatcctaaatactctctccgtttcaaattacttgccgttctaggtttgtactaagtcaaacattttaatctttgaccatcagtttctatatattatatttttagattcatcataagacatactttcaaagatagatgtatttgacttaggaaaaaacatagagtgacaaataatttgaaacagatggagtatcttggtatcttcacttgaatggaaacaatttcgactctctcagtaaaaaactcaaggatcataaccatgttctcacttgtttgtactttttgtcatgcctgtacaacttgggtgtggatagtgtttcaagaaacagggaaaggaagagaatcacttaaaacactttttgatggaattaaacattcactaagcaaaaacaagtaacatcaatttgctgaaatgatattagtctgtcccaagctgtacataacaaactataagacaagtcagaagtactacttatagggaactacaaaattatctatcatgtttttataattttatatctttatttcagtgcctatactgtccagacaagtgacaacttccatgatagttggcctcttcaaaggattacagtcaacacacttgcaagcagtttcgagcacctttagcatttgctcttcgcaccctgtgcctcgaagtgttggatccaacacctcaatctgctttccctctgatctcatcttatgtacccatgggacaagttcctctgatgtagacaagattggaacagggcgcctccccgtgagaagctctagcaggaccactccgaaactatacatatcacctctcaatgtagcaacccatgattgcccatattcagggggaatgtaacccagagtgccaactagttcagttgtgacatgggttatgttgggaaggaccaaccttgacagcccaaaatctgcaatatacgatttgaattctttgtcaagtaatatattgctggacttgatatcacggtggacgatatgaggcttgcagacatcatggatgtaatgaaggccctgacttgctccctgtgcaatcttcagcctggttggccagtcgagaaatgagctggcatcatcatcccaattgtgaagccaatcgtctaaactaccattctccattaaggagtatatgaggagcctcagattgccctggatgcagtaaccccagaagggcacgagattggcatgctgtgccatggatagtgcatcaacctctgcactgaattccctttctgttagacacatttcactattgagcttcttgatagcgatcttggaaccatctggtaactcagctttgtagactagcccatagcctccacacccaatgatatgcgccttgtcgaagttatttgtagctttcacaatgtcagcaaatgtgaggttgatttcttctccctttcctcgtgtaatcattatcaatgaatgctctgaatcagagttgaatgaagctgcttctaaatcaccatcgttgtcactactatttttggttatgaagcgtttgctcctttctgagacaaagaaacaccctagcaacaaaagaatgcaaatccctccaaagaagacaccaaatgatattgcgagaacgatttttttattctgttcttttctggacactgaacttgcttctgctgaactgcagtggtgattgaacctagagtcacaaagctttgggtttccttcgaagcttgagtttgagaatgtatcaaattggcctccagttggaataggcccctctaggtcattgttggaaatattgaatgctgagaggaagttcagattgcttagtccaggagggatttcacctgtgagatggttattggacaaatgtagaacctggaggcttgtgaggttgcaaattgattgtgggatctgcccagataagttgttgaagctgaaatcaagcacaacaagcacttccaactgaccaatcattggggaaatcacacctatgaagttgttatggctcagattcaacaacgtagggaagccagtaagcgtgcggtattgaaatgatggcccgttataaacaggaagctcaaaagcccctgggtccaaatgggctatgtctgatgttgatcttagcattggcaaattcatcaaggtgatcggaatttcttctgtaagtctgttgtctgatacatctatatagaacaggtggtttaaggaatcaatccatcttggtattggtcctgtgagttgattgccatttaaaagtagcatctccagattcgtgagcctggataaccatagaggtattttcccagacaacaagcaactgtttatgtcaagaacttgaagattcccaaaaccatcaatactttcgtcctgtggcatgacctctcctctaaagttgtgcccaataagcagggtggtaatggtgctgcaacttttaaggatctgaagtgcttttgtgatgttagtaagcttgttgtcatcaagtgagaagaaggaaagatacttcagattgattattcccggtgacaactctccatggaaatggttgcctgataaccgtagggctgtcaaattgctgcatgaatagatgctttctggaattgtgccggtgaagttgttgaagtaaagatctaaagtttttagattgtgtagagcggagaaattgactttgccaagatctccactgaagttattgtgcttgagatcaatgattgagagatttgtgcagctgcccagagttccgggcaactcgccagacatcatgttgctgtccaaatgtaactcctccaatctcttcagttggctgatagaatctggaatcttgccaatgaactgattccctcccagatcaagagttactagatttctcagttttgctatctgtgtaccatcaatttccccatgcaaattattgttaggaaaagataggtactccaatgagacatcattgaagagttcacctgggagtgtcccactgagcttgttgtgaccagccttcagaactttgagcatggagcaattaccaagtcctgaggggatgctgccactgaattgattgtaacatagttcaagcacagataaatttgatgagctgtcacaaaaacgagtcggtatcttcccagtaaacttattactgctgacattgagggcgaccagatttttcatcacatcccatatggaagatggaaactgccctgtaaataaattacttgagatgttgagtacctgcagtggcctgataggggttgaagatggcaactcgttgagacctccattcagcctgttaaagctgacgtcaacgatgatgatagtgctggaagacaccaattcttgtggtaaggcaccagatagcatgttgtgggagagattgagacgcagcaatccagtgaggttgccaagagacggtgagatgttcccctgaaggttcctagaagccagagaaacatcagttaccgtcccatcttggctgcaggcgatcccgtcccatttgcagcaatctgtgccgtcctgccatgatgcagagaggcctccatcctgagagagctccctgatgaacttgaggagggagctcctgtcctgctctgtacatgaactggtgagagaggcgaggttgatgagcagcaccagcgcaagggcaagaacaggtatgggaaatttgttgctgtgtttcttgtaatgaagtagctgcatggttttctggtgaaactaacatgaaaaacctgatgctgagctttgttcctgactggataggactaatcaatgaagagcatcaggaggaagagagaagctgcccttgcttccattttattctggtatactagtcgtaatcataaaaaagaaatacatgtcaaagattaggtgatatagcctatggatattcattaggacttttacagatactgccacaatatcttcttggcaaaatatggttatatagcatccagtttcgcctgtcttcttcggtatgacgtctcactagcgagtactattgaaacatcaagtggccgacctccctgatcgtgcaagttatttccttttgtttggaccattttttattttaatcgttgtcacattgacattgttacaacatggattaattgactccatctgacatcacttctcttaccagctgcacccctgaagccatgaaagacctgttagcttgccagttgccactgatgcgtacaaatttgttcatccttgagaagatcaaggagaaacgcccagggatcttccgactagttccacaaggtggtgggctagccggcgttggttcgaaatctcaccccttctatttatttgatattaggttcttccctaatattcacgtttttcttctgtgagaagatcaagaaacacagctggtgaagatttgtaagatcagctttgcaggtggtacatgggaagcatcattcggagagttgcatataatctagagcaatcatcggcgtcgcggtcgtggtgcggcacatgctctggacaccaacaaacacagctgattggttggtaatctggtgactatctcgtctctattattattgttgttgttgttgttgagacgatcacgcaagggccaaggcgtttactttctgctgtcaagcgtgcgcgttggttggcttatttgctccacacgttcagctgttatccatccttcaggcttcgccgttgtatgactgttgacccatggaggcatggactattatgacgctttgtggttgtggatgccatctgaattttggaagcatatcccctgtggatgccatctggctgatcacttgcatagttgcatcgggatttaggacaccacaggggatactggttgatcacacataatcatcttatgtattcttccgttctaaaataacttaaccgataatagaatatgacataacttagtacaataaatctataaacggattacgcaccaacaggctaacccttatgggcctacacgtcagaggtaagtagaagagcctcatcggtgtagacatggttgaatgtagagtactcttgaatgtacttcctggacctggagctacacaagccttagtttaattgaaccgttgtgtaaaaattgtattttttttaagtcatggtcatatatttctttttctgtttctaattccagtttgcgtacgaggtatttgcaaatttactcatttatggtgtatatatgaagtgtaattccaatcgttctatgcgcaaaggttatactatactatcccttaccatctctgtttatatgatcataattcaatttctgctgttctctaacaaacgacggcatgtagggaaaaaaaaacaattctaattggttagacttcggctgaaatccgtagaaaaatgaacgaggtattacaattttttttttgtggtttaaaagccaagaccgaaaagaatagactaccatataaaaaccctaaaatcaactaaccataccaaatatagtttagggtattgtgaacttttttttttttagaattgtattgttaacttcttttttttttgacacggataactttagtttccattaaccagcagcctcggacaaatcgccggagaggcggagaccaaactagttacaaactccggggcttggctccagtaacaagttgagccaggggccacggtaacagctccataggaggccattcgatcggccaccttgttacagattctagggcaaacagatatcaaaagaagtgattaacagggccctaatgattttgaacaaagctccatctgcactccgatccatctcctgggaagaaattgtattgtgaacttagagtaagtttaatagtatagccaactactagctccaattcatctataaccaatctaatagctcattcatacaatagttacatactacactattaatatctagtctcacctatcatacacacactgcgtcttggagtccgtgctataaatctgtagcccgctgcgcttctctctccttatttatctgcttaaaatatgtttgtagctggcttatagcctgctattgtaactgctcttattcctaaattttaactacgactgataagccaacgatgaaattaagttgggctggaatacatgggcctcgtgtggtcgtttctctccgggcccaacacgagcccgaaagcttcgatacttctcccagactagcggcggggaggcgaccggcggcgacaggtggccggctgcccgcggcgccgcggatttgccgtttgctcctcctccgggaccgtgtcaccgggcagcatgacgccgcgcgacggcgacgcggcgacgcccttcgactgttcgacgcaatgccagggggaggggttggggttggtctggtggaagtggaacggagccgctttgctgtgaggcgccttgctcagggtgttcggcgaaatgcccgagaggctgtccagttccggtcgggcgccgactgcggccgtcgaagatctcgtggaggtgggctcgtcgaccaggcgactgaggggccatgcttcgtgagtgcgtgccgacaatgccgcgctctcttcacgcgcgccagtgcgcctccttcgacatggtcagttgtgctgccttctctttcagctccatgctagtccctagcatttgtgctggtattttatcaacgcatttcacaaccaacttagcaaaatatcttggttagcagaatttcacaaccaacatggttagtagtgctgacctagttaattttttcaataacacattgatgatcggaaacaaactgcttatagcagaatatcttggtatctttctaacctttttgacgttgtttctacctttttgtcatgcctgtacaacttgagcataaatagtgtttcaacaaacaagtgaaggatcaaagcaagacgaattctttcagcactcaatgccctgaaatgatagtagtctgtcacaagccgcggagaacgaactataagacaagtcagtcagaagtactaattctagtgaaattacataaactcctgttgggtgaaagtacaaaattatctatcattgatgttatgtgtttcggtcagcgtctatactgtccagactagcaactacttccatgatagttggcctcatcaaaggattatagttgacacacttgcaggcagtttcaagcacctttagcatttgctcatcataccccatgcctcgaactgttggatccaggacctcgatctgttttcccactgatctcatctcctgtacccacgggacaagttcctttgatgtagacagtaaaggaacaggccgtcttcccgtgagaagctcaagcaggaccactccgaaactgtatatgtcgcctctcaatgtagcaatccatgattgcccatactcaggggggatgtaacccagggtgccaactagctcagttgtgacatgagttttgctaggaaggatcaaccttgatagtccaaaatctgcaatataagctttgaattctttgtcgagcaggatgttgctggatttgatgtcacgatggacaatatgaggcttgcatacatcatggatgtaagaaatacctaggcttgctccttgagcaatcttgagcctggttggccaatcaagaaatgagctagcatcatcatccctgttgtgaagccaatcgtctaagctgccattctccatgtaagaatatataagcagcctcgagtttccatgtatacagtaaccccagagtggcacaagattgtcatgctgcgccatggtgagtgcttcaatctctgcagtgaattccctttccatcaggcacatttcactattgagcttcttgatagctaacttggagccatcaggtagctcagccttgtagactaatccataacctccacaacctatgatgttctccttatcgaagttatttgtagtcttcatgatgtctgcaaacgtaagcttgttattgtctcccttgccttgtggcatcaccatcaatgaatggtctgaatttggattgaatgaggctgtttcttcatttctgttgttagctaattccccttttctcatcaactttgtagccctgagtgacacgaggagactactcagggataaaagaatgataatgcctccaacagacacgctgagtgtgattgctaaaataactttctttttgtgttgttttctggacactgaaggtgctcttgatgaatcacagctgcggaagatatttgagccacacagctttgagtttccaacaaagctagaattttgaaatgtactaaactgacctccagttggaatagacccttccagatcattgttagaaacattgagcttagaaaggaaatgcagattgttcagtgcagatgggattgtacctatgagatggttattggataagtcgagcacctgcagatccgtaaggttgcaaagcggttgtgggatctctcctgaaatactattgaagctgatattgagtgtccggagcatttttagttggccaatctcttgtgggattgcacccatgagatggttcctggctagatttaatgttgctgggaaagcacgaaatccacggtattcaagtgatggtcctgtataaataggaagctgcaggatccctgggtcaaaatatggtgtagaatttgctgatatgagccttggtatctccatcaaagctgttgggatcccccctgtcaagctattgtttgatatatcaagatagaagaggaagtttagtctgttaatccaggcaggtatttgtccagtgagttgattgttagataaatctaacatctgcaaattagtgagttttgataaccaaaatggtatgttcccaatcaatgaacagtcatcaattgatacaaattgcagattctcaaagccatcaattgtttcatcctctggcataagctcaccattgaagttcactcccataagcaaagtgctgaggctcctggagttcttgagtatctgaagtgtatcagtgatattcgtaagagaattgttggaaattgaaaggaaggagagggacttcagattgcctattccctttggcagctggccatggaatttattggaagacatccgcaatgcaattagattgctgcatgaatagatgttttgcggaattgttccattgaagttgttaagcagaagatctaaagtttgtaaattgggtagggtggagaaattgatcttggagagctctccactgaagctgttgctcttgatatctatggttttgagatttgtgcagttgctcagagtcgatggcacctctccatacatgttgttgtggcccaaaaggagttcctctaatttcttgagttcacctatagattctggaatcctgccattgaaattgttccctccaagatcaagtgtaaccagattacttagtttcatgatatgcgcactatcgagtgttccatttaaaccattgttgggaacagacaggtgctccaaggaggtggcattgaagagttcatcagggagagtcccactgagattgttttgaccaaccttgagcacatttagcctggaacaagctccaatccccgggggtatgcctccactgaacaggttgtaacaaaggtcaagcaccattaaggatggcgagctcgagcagaaatgatccgatatctgcccagtaaatctgttgttgctggcattcagtgcaaccaggttcttcatggccttccatgtggtggatggaaactgtcctgtaaacgagttgctcgagatgttcagtacctgcagaggccgaacagcggtcatcggagatagcgggtcttgcagctcccctctgagtcggttaaaactgacgtcgaggacactgatactgctggaagaaaccaattcccatggtaggtaaccggacagcgagttgtgcgataggttgaggcgtagcaggctagtaaggtttccaagagatggtgagatgtgcccttcaaggccctttgattgcaaggagatatcagtgaccgctccatttctgttgcaggtgataccttcccagacacagcagtttctatcattccgccatgacatggaaaggttgccgtcttgcgagagctcggcgaggaactggtgaagagagcccttctcctgctctgtgcaggagctggtgagagaagccaaggagatcagcagcaggagaccaaggctcagggaagatatggtaggtaatttgctgctatacctgtatgatggaaaatggagtggctgcatgattctctgatgaaactatgatcaaaacaagatgcttggcgtgtaaagaatcaattgtgtagtcaagaacgagccatgaggaggatgaaagaagccacttttgcttctaattttgttttggacttaccggtcgcagtccatccaggattagatatttagatgcaatagcctataaggagtacttgctaagttttcacaagattgatgcatggtctttgttaacgcgtgtgctgttaaattctctaccggttgactgtagaatgatctattgcacagtcaaccttcctgggtatactagctactaccggatgggatatatcatagtactacgaatctggacaggtctctgatactagattgctatattatggcacggatcaatatgttttttttttactgaagcattaattctttactcaatccttatcacgttgctcttgttacatcatggttaatatttgaccgtatatatcacttatgttaccaggttctccccagcttgtattttgtgataattcggttgaagatttgcaattgtgtacatggaaaatcatcattccgagaggtgcatataatttggagaaatcattggcgttgtggtcatggtgtgtacgcatattttggacaagaacaaattgagcacaagtggtggtggtgagtgggcgacccggtgtgttgctgtcttcttcttcttgaccgtttactttctgttatcaagcgtgcactttggcttatttctccacacgtttgcagctctttttccatcttctaccggctccactgttgtatcattatagaccatggattatgactggaaatttgggagaaatttgataatttgacactttattcattgttgttttgctttaattgatacttgtgcgaatgatatgtgggaccatctgagtgaatgaaagtgaccagaacatgatgttaaatactccaagcccacttttgtggaatgtcaagttgtcaaatctgtcgaaattttggaagcgtgaagaaaagtacaatgggtaccgtatgagggctggatgatgtggggcaagctatatcacttgggacatcatggtggagccctgactcttgtacagacatatgtggtctatggaacggactggagccacagaattgcactagaatctgggctcattttgcaagctggtgtaagacttgtcctcctttatcatggacatatttttctaattttaattccgatttgcttacgaaggtctgttaaaaagttcaggtgatatcatttcgatgctcggtagtaggtctagtgcacttcaattattttgttccattgtctttgggacataatgcaagtatgcaaccacctagacagtctttctttctttttttcatgatcatttttcttttctgtttcttattccaatttgcacatgagatatatgcagttttactcattagtttatggcttatatgaaaatctgtgattcgagtcgttatatgcgcaaaaattatatagtactaccttcatcctaaaatgttgctatctaatgtaagatgaggcactacctagtgctacgaattttaacaatgatgtctcatcttatattatgtagtacttactctgtttcacaatgtaaatcattttagcattttccacatttatattgatgtcaataaatctagacatatatatttatcttgattcattaacatcaatatgaatgtggaaaatactagaatgacttacattgtgaaacggagggagtaacattttgggatggaggtactatctcattcaccaaatgttgaggtaaccaacataaaaaaaaaaggagcgagtagtactacctctgttccaaaataagtgcaactatggatatccgtgtccaacgtttgaccgtccgttttatttgaaaattttatgaatttttttaaaaaattaattacacttaaaaggactattcatgttttatcatttattaacaataaaaatactaatcatattttttttcaaataagacgaacgatcaaacgttggacactaatatcgcaaaactgtatttattttgggacggagggagtactatcatctctgtttatacaatttataattgaatttctgcaatgatcatactagtgcttctgtccataaaatcatagacatcgccgttatgccaagggatggattcatcgattagccttaagttgggctggaatgtgtgggcctcgtgtggtcgtttcccttcgggcccaacacgagcccgaaagcttccatcttcttccagattagcggcggggggaggcgacggcgaccggcggcgacgggtggccggaattgcggttccgtatccctctcctggcttccgcccaccgcgccctttgactgttcgacgcaatgccagggctggcctggtggagcggccgagcggaggtggtggagccgcttcttcgctgttaggcggtgcgctcagggtgttcggcgaaatgctcgagaatctggccggcggcgagtccggccgttgaagatctcgtggaggcgaagggaccatgcttcgtgagtgcgtgctgcaatgccaagctctctccaagcgcttcggcttcgcgaggttagtgatgctgcattatctccccgtcccatgctagggcttagcatttgtgctggtgtggttcacttatctattctcttccggtattaagaatgcgttgatcggcaacaaacatctggcaacacctagtatcttcacttgaaccgaaaccattctgacttaatttctgagttaaaaacttaatgttctcagtcattgttacttttcatgcctgtgcaacttgagcacgagtagtgttcctaaaaacttttgtttagtttatatccatcacgcacatttcacctttgagcttcttgatggcaatcttggagccatcaggtagctttgccttgtatactggagttaatggcttaccacattcttcactatatcgatctttttacgtggttggtactctcattcttttgattgactagatgcgtgttcagcttctggtgatcacagagttttatccctaccaccccaaaaactgcgttgcattctcattctcttccatacttgaatcacacatttctggcatgtattcattagattcctgtggtttctatgtacgtcaatcagaaacaagagtgctgatatcacctaattgccttagcatttgcactcgatttgtttgagcacacaaagaacaggatgatttggcaggaggctggcctagtctagctctggttgtagacaagtgtagctcctagcgtttcactgccgtgaggcggtgctgccccggcaatttaagtttgccgagcatttatgtactaaactccttttaaaatctaatgaaattcagatggcgtccttctgccgtcccagcgaaaaaaggaacaggatgatcttttcacttgtttatacttttcctcatgcttttcgccaattgagcgtactcagcacttccttcagtggaggagaaatgtctggttatgaaactaaaaactcctgagaagatacaaaagtgcaaaatggtaatatgtcagcagctgtacacaacatgttacaagaccagaaaaactactactacgtaataccacatttgctctatgcactgagctacaattttgtcattgtataactgcaatctaccttgactgccttgtgccttctatatcttcagtcggagcctacactgtccaggcaggaaactacctctgtgatagttggccgcatgcaaggattacagttgacacatttgcaagcaacttcaagcaccttgagcatctgctcttcattccctgtgccttggagtgttggatccaggacctcaagcatgtttcccttggacttcatttctagtacccatggaacaagttcctctgatgtagagaggattgaaacaggccgtcttcctgtgagtagctcaagcaggaccactccaaaactgtacacatcgcctcttaaggtagcaacccatccttgtccatactcaggtgggatgtaacctagagtgccgactagctctgttgtgatgtggtttttgttcggaaggatcaatcttgacaacccaaaatcagcgacataagctttgaattctttgtcaagtagaatgttgctggacttgatgtcacggtggacaatgtgaggcttgcagacatcatggatatacgaaagaccctggcttgctcctcgtgcaatcttgaaacgtgttggccagtcaagaaatgagctggtttcgtcatccctattatgaagccagtcgtccaggctaccattttccatgtaagaatatatgagtagcctcgagtttccctggatgcagtatccccacaaaggcacaagattgtcatgctgtgccatggatagggcttcaacctctgctgcaaactccctttccatgaggcacatttctccattgagcttcttgattgcgagtgtggagccactgggtaactcagctttgtacactagcccataacctccacatgctataatattctccttatggaagttatctgtagcctccatgagatcagtgaatgtgagtttgtttgcttctccactgcctcgtggtatcattaccaacaaatgctctggatcagaggtgaacgaaccggcctccagatttccactagtgttgcttttgttttcgattttgggaattgcatccctgagcgagaaaaggaagtgcgccaatagcaaaacaattgcggcccctccaaaaagcaccccaaatactattgcaagaatgacccttttgttcaactgttttttggatgctgaggcttcttctgctgatttgcatttgtgagtgagcatagagccacacagctttgggttaccatcaaagctggaatttggaaatgtactaaactgagctcctatgggaataggaccttcaaggtcattgtttgaaacattgaatgctgaaaggaagttcaggctattcagttcaccaggaattgaacctgtgaggttgttattggataaatcgagaactcgcagacttgtgaggctgcaaactgattgtgggatctgtcctgataaattgttgtggctgaaatcaagtacgacaagcatttttaactgaccaatttgtggggggatcacacccatgaacttgtttaggcttagattcaacagtgtcggaaaagcagtacgtgtacggtattgaagaaatttaccatcataaacaggtagctcaaagaaactaggctctgaataggtcttattctgggttgttcttatcattggcatgtccatcaaggtaattgggatttctcctgctaggctgttgtttgatatatccagatagaacaggcggtttagtgagctaatccagtctggtattggtccagttagttgattgttggataaaaatagtaacttcaagtttgtgagctttgatagccaaagtggtattcttcctgataatgaacagtggtctactgagagagcctggagattctcgaaaccatcaatggtttcatcctgtggaatgacctcttccatgaagttgtacgcaataaacagggtggtaaggttcgtggagctcttaaggatctgaagagctcttgtgatatttgtaaaagaattgttactcaaagataggaacgagaggtacttcagcttgcctatttctgatgacagctcaccgtagaaattgttatacgagagccgcagtgcaatcaagttgctacatgagtagatgctttctggaactttaccactaaagttgttcatgtcaatatctaaagttttcagattgggcaatgtggagaagttgaccttgcctagatctccgctgaagctgttgctcttgaggttgatggttgtgagatatttgcaattgcccaaagccgatggaagctcaccatgcaagttattgttgtccaaatggagctcctgcaatctactgagctgacctatagtatctggaatcatgccactgaagttgttccctccaagatcaagtactaccacattactgagttttactacaggtgtactaccaatgtttccttctaaattattgttgggaaaagagaggcagtccaacgaggtagcattgaagagttcgtctgggagagtcccactaaggttgttgttgccagccttgaggactctgagcatggagcaatttccaagttcagggggaacgcccccactgaattggttgtaactgagctcaagcacagcgaaggatggtgagttggtgcagaaattagttggtatatgcccactaaagctgttgttactgacattgagtttgaccagatttttcatcactttccatgtggaggatggaaactgtcctttaaacaaattgcttgagatgtttagtacctgcagtggcctggcaggggttgaagatggcaactcatcgagacctccattcaggcggttaaagctgatgtcgatgacaatgagacttctggaagacactaattcctgcggtatggcaccggatagcaggttgtaggacagattgaggcgcaacaatccagtcaggttgccaagagatggtgagatgtgcccctcgaggctcctggaaggcaatgaaacttcagtcacggtcttatcttggctgcagtttatcccttcccattcgcaacaatccatgccatccttccatgacatgctgaggcccccatcctgagaaaaccccgtgaggaaattgaggagggtgctcttctcttgctttgtacatgaactggtgggagaggtgaagttgagcagtagcacaagggcaagaccaagaacaggtatgggaaatctgttgctttgtgtcttgcatgaagaatgaggtggctgcatggttttctggtgatactagcatggaagccttatgcttagtttgtatcctgagtttctgactgggcaaagcatgagatgatctaatcaagaaagagcttgaggaggaagaaagaagtggctcttgcttccattttcctagcacgtgacaactttattctgtttttctactcgaagtcataaaaaagaaatacaggtcaaggacttcataaaatcttctattgaaaagtctgagtggtctgcctccctgaccgtacaagttattttcctttaatcatttttatttatttcaattttcctttaatcatttttatttatttcaatccttatgacattgacattgttacagcaatcctaaattcacttgatctgacaccatttctcttcccttgacagatatgtttgcgtgctactaatacggtcatttttttacacaaggatgcataccttttggtaaggaggaaaggactcatgtctgtaaaaagaaacaaagcttctgaagatgcttgaagagtttaagtaagctagggtgtagtctagtgattgcagtgacctgagtaataccccaaggttctgagttcaaatcttcataggagcgaatttcagagattaggttgtttgcggggctaagttccctatttcaatggccgtatatatccagttggatgtagaggccgggtaaaaaatacccttctctaaaaaaaagaaggtagcgtgtgagggctgcaagtggcagcaggctgatcacttgggagttgggacaccacagggaagcatagaaaaactttattctgattgtacgagggatatcaagttcttgacattttgatatcaagtttcttgatacgacctatacaattccatagcaaaattattttagggcttgtttggattgaagctaatttttgccctaccaattttattacgattgtacgaggaatatcaagttcttgacattttgatatcaagtttctcgatacgacctatacaattccatagcaaaattattttagggcttgtttggattgaagctattttttgccctaccatttttttgacaactttaataatatcgcatagatatttggtttgctacttaattttggcaactcttaactagattgatgcatgaatatatgctttgcggaattgttcctttgaagttgttaagcataagatgtaaagtttgtaaaaattgggtaaggtggagaaaatgatcttggagagctctccactgaagttgttgctcttgatatctaatctatggtttcgagatttgtgcagctgctcggagtcgatggcacatctgatctctccatacatgttgttgtagcctaaatggagttcctctaatttcttgagtttacctatagattctggaatccctgccactcaaattgttccctccaaggtcaaggttaactagattacttagtttgcaagattgctgaagatttgcaaagattcacttggaaagatggtactacgttacatggaaatcatcattccgagaggtgcacataatttggagaaatcattggcggcggcgtggtcattggtgtgtacatggtttggacaagaacaaattgagcacaactggtggtggcgactggtgagtggtgacctggtctatttctctcatcttcttgaccgtttactttctgtcggaaaagcgtgcgctttggcttttttgctccacacgtttgcagcggtttcctcttctggttccaccactgtgactctgaattctcgtgagaaatttgataatttgacactttattcgttgtggatttgttttaattaatacttgagagaatggcacatgggaccattcggataaatgaaagtgggctataatgttaaataatcgaagcccacttttgtggagggcgaaattatcaaatctcatttttggaagtgtgtgaagacttgaagtaaaccggttagcgcgtgaggcctatatgtgacaggggcaagctggttgaacacttggaggtgggagggacaccatggtggaggctgattcttcgttcttgtgcagacattatcatttcactgcttttgggcataagcgaaacggtatatttacaaatgaaaaataatttgtaaataaaacttgtatatacgtattcttaacaatctaaaagtaaagactaaaaaataaaccatgatgaaaaaaatctcaaaatcaaatctaaatttaaagttgaaaattcaaaatttagctgataagtataagtatataagcgaaaagatgaggccgctggtttattgaaacggacgggagccacagaattgcacaagaatatggggctcattgaagctggtgtaacacttgccctccttttctttttatcatgatcatgttttgtaatttcaattccaatttgcgttttgagatccttctaaaaatttcaggtgagatcattttgatgctctatagtaggtgtagtgcccttcaattattttgttccgttgtgttgttgaccaatctttttgtaataatcatatattttttcctgtttctaattccaatatgcgcatgagatatctgcaattttactcatttattgcttgtatgaaatgttgtgattctaatcattctctgtttatacgatcattattcaatttctgcaaacattatattaggacttccgtctatacagagagtagatagacatcgcagttttcttttcttttcttctctttttttttgagagaagacatcagtaagacagtaactgtcttaagttaggctgaaattcgtgggcctcatgtggtcgtttctcttcgggcccaacacgagcccaaaagcttcccatcttctcccagaagattagcggcgggggaggcggcggcgaccggcggcgacagggtggccggatttgcggtcccgtctccctctcctgggcttccgccaccacccgcgggcgcttctcctccaccgggaagcctgccgtcgcgcgacggcgactcccttcgactgttcgacgcaatgccagggcaggcctggtggagcggaggcggagccgcttcttcgctgcttgaggcgaggcgttcagggtgttcggcgaaatgctcgagagtcgcttgtccagtcctggtcggtggcgacttcggccgtcgaagatctcgtgggcggcgactgtgcttccgcttcgtgaggttagttgtgctgcattctcttcccactccaagctagggctagtagcatttgtgctggtgtggtattcacgtattccgcaactaatgatagtcgtatctactacatatacaatgcgttcatcggcaacaaacagctgacagttgacaacacatagtatcttcgcttgagtagaaatcattttgacttaatttctcagtgcaaaactcatggaacataacaacattctcgctgcttgttacttttgttgtcatgcgtgtacaacatgagcacggttagtgttccaataaacaggaaaaataaaacacattacatgaactcttatctactactactaatatagtgaacggcaatgcctcaaaatgacattagtctgacataagctgtacagaatgaactaaaagaccaatcagaaatactagcactagtgagactagatcaactcagttcactgaaagtacaagattatttgtcatattattgtatctttaggtcaggccgtcagggtctatactgtgcagactggctactacttctatcatagtaggcctccgcaaaggatcacctttgacacacttgcaagcaatttcaaggacctttagcatttgctcttcacaccctgtgccttgaaatgttaaatccagcacctcaatctgctttccatttgataccatctcctgtacccatgggacaagttcctttgaggtagacagtatcggaactggcctcctcccagtgagaagctcaagcaggaccactccgaaactgtatacatcacctttcaatgtagcaacccatgcctgggcgtactcaggtgggatgtaaccaagagtgccaactagctcagttgtgacatgagttttgttgggaaggatcaaccgtgataatccaaaatctgcaatataagctttgaattctttgtcgagaaggatgttgctagatttgatgtcacggtggacaatacgaggcttgcagatattgtggatgtaagaaaggccatggcttgccccttttgctattttgagccgtcttggccaatctagaattgtgctggtatcatcatccttgttatgaagccaatcatccaggctgccattctccatgtaagaatatatgaggagcctcgagtttccctggatacagtaaccccagagtggcacaagattgtcatgtcgtgccatggagagcgtttcaacctctgcactgaactccctttccatcagacacatttcaccattaagtttcttgatggcaatcatagagccatcaggtaactgtgccttgtagactaatccataacctccacatccaatgatgtgctcctggttaaaattgtttgtagcttccacaatgccagtgaatgtgagcttgttttctgcttccttgccttgctgcaacattaccaacaaatgatctgaattggtgttcggtgataatgcttctatgtaatcattgttgcacctacttttggtcgtgaaactcatacccctgattgacagaaggagataccccaacaacaaaagaatgacaatggctccaaaaaggacacaaaaaacaattacaagtatgaccttcttgttttgttgtttctttgagaccaaatgtctatcaaatgaactgcaatggtgtgtaagcataggaccacacagctttggattgccataaaagctagaatttgtgaatgtactaaactgtccgccagttgggataggcccttctaggtcattatacgagacgctgaattcgataagaaaggttaaattgttcagtgcggctgggattgtaccagttagattattgcttgataaatccagcattagcaggtctctgaggttgcagatcgactgggggatatctccatataatttgttaaagctcaaattaagcaaaaggagcgctttcaactgaccaatctcttgagggatcaaaccggtgaattcattgttacctagattcagcactttgggaaaagcactggccttgcggtattgaagtagtgttgcatctatatatacgggtagttcaaatgctctagtgtccaattgtgctgcagccctgtctgaccttagcattggcatctgtaataaggccatcggaatttctcccgtcagattgttatttgatacatctagatagaagaggaagtttaggctgctgatccagtcaggtattggtccagttagttgattgttgtctaaaaccagcatctccaacctcgagagttttgataaccattgaggtatttttccagaaaaggagcatccacttaggtcaagaacctgaagattctcaaaaccatcaattctatcatcgtctggtatactttcattcatgaagttgttgctaataagaagggtggtgagtttgctggagctccttaatatctgtagtgcatttgttatgtttgtgagattgttgtaaccgagtgacaggaaggaaagggacttcagattgcctagtccctttgataactggccttggaatttattcaaagatagccgcagggcagttaggttgctgcatgagtatattgtttctggaattttaccactgaagatgttctgccgaagatctaaagtttgtagactgggtagattggagaaattgacattcatgagctctccactgaaattgttgctattgaggtcgatggttttcagacttgtgcagttgctcagggttgatggtatgctcccaaacattttgttgttgttcaaatggagttcctccaatctgttgagctgaccgatagactctggaatgttaccactgaagttgttctctccaaggtcaagggtagccagcttaccgagtttgacaacatttgccccttcaagtgttccttgtaaattattgtttggaaaagagaggcactctaacgaggtagcattgaagatttcatcagggagagtcccactaaggttgttatggccagccttgaggactctcagcctggagcaacttccaagttcagggggaatgctcccactgaattggttgtaactgagttcaagcacagctaaggatggtgagttggtgcagaaattagttggtattttcccagtaaagctgttgttactgacattgagtgcggccagatttgtcatcactacccatgtggaggatggaaactgtcctgctaacaaattacttgagatgttgagtacctgcagtggcctggcaggggttgaagatggcaacttgtcgagacctccattcaggcggttaaagctgatgtctatgacgatgagtttgctggaagacagcaattcctgcggtaggacactggatagcaggttgtaggacaggttgaggcgcagcaatccagtcaggttgccaagagatggagagatgtacccctcgaggctcctagaaggcagtgaaacatcagtcacggtcctatctgttctgcaggtgatcccttcccactcgcaacaatccacgccatccttccatgacatgctgaggcctccatccttagaaagcccggtgaggaaattgaggagggagttcttctcctgctctgtacatgaactggtgggagaggtgaagttgagcagcagcacaagggcaaggctaagaacaggtatgggcagtctgttgctttgtgtcttgtatgaaaaatgaggtggctgcatggttttctggtgatactagcatggaagttggatgcgagtttgtatcctgagttcctgactgcgcaaagcatcagatggtctaatcaagaaagaacatgaggaagaagaaagaattagctccaacttccattttattctgtctttctagtcatggttataaaaaagaaacacaggtcaagaactttataaaaaagaactgctatagcagcttcttggttcacattatgacgttgcactagcaggtgcctgctatatatatatatattgaaaaaccaagtggtcggcctccctgaccgtacaagttgttttccttttaatcatttttatttcaatccttatgtcattgacattgttacagcttgcctaaattcacttgatctgatgtcatttctcttccccttgacagacctggttgcttggtactaacacacacaaatctttacacagcttctgaaggacgcataccttttggtaaggagcaaaagactcgtctctgtgaaaagaaacacagcttctgaagatttgcaagatccactttgcagatactacatgcaaagcatcattccgagaggtgcatataatttagagcaatcatcggcatcgtggtcatggtgtgtacatgctctggaaaacaacatagcacgactggtgggtgattgggtgggtaatctggtgctctcttcttcaattcttcttcctgttgacccaagggccaaggcgtttactttctgttatcaagcgtgcgttccggcttatttgctccacacgcttgcagttgttttccattctcccggctccactggtgtatctttgtagaccatggattatgactcttgtgtctatctctgaattttggaagtgcttgaagacttgaagtaagctgcgtagcgtgtgagggctgcaggctgccagtgggagctggcttatcatttgggacaccacaggggagactggttcttgtgtagacatggtctatggactatggaacggactgaagccacacagatcttcaggtttgtgagaattccatttcttccttccttcttttgtcataatcatatttttcttattttaattccaatttgcatacggagctggtttaaaaaagttcaggtgagatcatttgatgctttgtagtaggtgtagctgcactttaattaattcgtcccattgtctttgggacataattcagccacccagaccttaatctttttttaaggggcacccagacggccagaccttaatttagctgaacagttgttgtttcgaaaggcatttatctgcagatgagatcctctaataaaatcaacccggatcgttctgatatctgatgatctgtagcaggcgcaattgcactttatattcatgtccagcttctgcggtatgatgttccatgtgctaatacaggtagctcaaaattgtttgtgtctgcattaactgaaaaaatatagacagcaagtttctgtcaccaaacaccatcaggatctccatatgaaaattacatagttgcaattacatatgccatccctcctgcttgtttatttcccatgctttcattttctctcttatacgtgttttatgtcgttggttatatggttcttttgacaccatttcaggtgcagcacaaactggagaaatccttcggccagaacagaaacagcatggggaacacaagatgattacagaagatcggctgcacaaagaccaattctagaaacagcatagaggccatttccagttcagacgactgtagtgctgtactgctgtgctgcacgtcgtacacgtcgaagtctgaagaggattgctgcactgcagatcaatcaatgattttccaattttcgtcaaaacaagaaaccaatgattttccaggctcatggacacggtctacccaggcacccatccgtagacggtaagcgatcctaatcatcactgtaggagtagcggggccctgtgtcttttgtcgtgctgcatatcatatcgtctatggaagaatacatgggccgtgtttagattcaaaatgttttcttggaacttccaacttttccgtcacattaaatgtttgcacacatacatgaagcattaaatatagacgaaaaaaaatcaattgcacagtttgcatgtaaatcgcgagacgaatcttttgagcctaactgcgcaatgatttgataatgtgatgctacaataaacatttgctaatgatggattaattagacttaataaatttgtctcgcagtttacatacagaacctataatttgttttgttattagtctatatttaatactttaaatgtattttaaatgtatggccgtatacttaaaaaaattttggaccacgaactaaacacaaccatgattaaaattagtctcgcctagcgtttcacacctgtccacttgcagtgcaaaattatgaaaaactgatggcgatctggcgatgaatgaatgaatgattcggaccgccgctacgttgttgctgccgacgcgttcgttggccgtgtgtccgtgtctcggtctgcagtcttcaggttcagaaagttttctccttgttctgaagtcttcagaggaaaattttgtttgttttttactccatcgtcccgtggattctgcaatttttttttataaaaaatgtaatttgttgtttcttcagtgtctcagtccgatcggaatgaaatggaatggaggagatggcggtgtgaactgtccttggtagtggagttgtggattggctcgtatacgacaaatgtatttggatatttggcacttgttatcgctggaaaaaatatagtcaagtcgtgtacgaggaaaactgcatgctactaccatacatacgaaggatatcaagttcttgacattttgatatggagcatagcaaaactgttctagttctcgtttgaaatgcgagaatgtgttcacaaaaggctgattcattttatttaaaattcacgcaatattcctctgttcgaaggaaaggtcttgttgtgtttttctttttcttttttttcttttctagtgcaggctgatctgctgtgctgagtgcagaccgtggcagaagtgatttacttttccttgtataagggggtgtttaaatccggggtgtaaagttttagcgtgtcacatcgaatattatataaggtatcgcatgtggcagggtttacattaccggttgaccactaaatttcgaaccccatcggtatcaccgttttcgataaattttgatcggttttcgataaatttcgaccaaatctattgtttatccttcgaaattccaatcgaaacttaattccgagccatgtaaacatcgaaatttcatggaatttgaccggtttttgtcggaattatgaaccctggcatgtggtgtttgggtactaataagaaaactaattacagaattcgtcagtaaagtgcgagacaaatttattaagcctaagtaatacatcattagcaaatgtttactgtagcactacattgttaaatcatggagcaattatgcttaaaagattcgtctcacaaattagtcgcaatacgtgcaattatttttttagcacatatttaatacttcatgcagatgtttaaacgtacgatgtgatagggtgaatatttttggggtgtgctctaaacgaggcctaagagcatcaccaacagattatctataattttctcctaaaaatttgatttttgggttttctaaactgaaaatagaaagtgaaaaaactcctctctccaacagatagcctaaattcaatccccaaaacttaaaagtgagcccttctgttaaactaccaaaagaaaattctgttttttttctttcacgcgcagaaagattgctatctcccacgcgcgggaatgaaggagagaggcgggattgcgtgattgggagtgactttcgcgcccgcatataaacggagcgaggaaccgggggaagggaactccaaaactcgggtaggagagtaggggatctgttggagctgatttttggactaaaatccctcaaaattagtttagatctaaactaattttgagggattttagtccaaaaatcagctccaacagatcccctactctcctacccgagttttggaggctgttggagctgatttttggactgaaatccctcaaaattagtttagatcccctaaactaattttgagggattttagtccaaaaaatcagctccaacagatcccctactctcctacccgagttttggagttcccttcccccggttcctcgctccgtttatatgcgggcgcgaaagtcactcccaatcacgcaatcccgcctctctccttcgttcccgcgcgtgggagttagcgatctttctgcgcgtgaaagaaaaaaacagaatttccttggtagtttaacagaagggctcacttttaagttttggggattgaatttaggctatctgttagagagaggagttttttcactttctattttcagtttagaaaacccaaaaatcaaatttttaggagaaaattataggttttttcactttctattttcagtttagaaaacccaaaaatcaaatttttaggagaaaattatagataatctgttggtgatgctctaggattctattctggaatcctttcgcttttatcggtttctcccaaaaagccggatcaatagcaattatagccgagtgcaggaccgtggcagaagtgatttctggtgcaccaacgggtgatgagccctgcagcccctgctcacatttgtagaatttttttcgtttttagatttttttttaatatttacagaaataatctatcggcgagaaaaattgcaaaaatagaccctgccgcccaccattggggcggcaagctgacgtggcagacggtgggtcgaccgcgccgtctgccgccgtcggccaaaattccgattaggcccttgccgcccatacagagggcggcaagggtctaatagcaattttggctgccctccaggagcttgcggctgtactttttgcatctgggtcccttgccagatgtaaaaagtacggccaaaatatttttctatgtaatgttaataaaaaataaagaagtatttgttggtaaaacttgttaatattgttataaaaatgtattgaagttggttgttgcgcaatttcatatgttaagtgaggtattattttgtaccttattcgacgtattagtactcggataattaatataggcctatcgcagtctcggtcgtagaaacattatatggacttaaacaaggagaattatgtaacatgaagaaatagtagtacaatttgaacatgatacaactatttcgattgcggttacatagatgatattagattcgaactaggagggaggtagtgtaatagttgaacacaacgacgatgtagtaatgggacaaggaagcatgacggtagaaattttaatttgccaagttgtccgataatagctaacccctacgtgaggatccctctcctctctcaaaccgcgctttagtaaccctgtattgctctggtagttcaagctgcacaacacggcaaggtggagttagaacccttctggtgtctatccattctctgtattgacatctccttggtggttcctgggaggaaagaatagatgtaaagcgagcaaagttagtaaatgttgtgagaaaataatgattaatgtaatcaaaatattcttaccatgaaatcgtcgtcaagaatatttggacaaacaaagaaccttcgacccaatgttgtaggatttatggaacgaagaacctgacaacgatcaccacacctgcatcttggacgggcttcccatggagggagtgccgtagttagcacccgccagtcgctctgttgttcacgacattgtcgttcataagccgcttttctctttaagtattgctcagtactttcggatgcgaaataccagcgaccttcttgtaaacaagtggttaggtcgagaacgggattttctgtatcgacccactcgatgtatgcgcaagccgtagtgcgggtctgccgaatagagtagtgttacgaagaataaagcgattgcccatacggaatgaataagcatttgcagataataaaatacctcacggtcatagttagggcacctaaaaaagcgccttcctcgaatatcaggattcctcgaagccattagttggcatcgatcaccgcataggcagagaggacgctggcaccaaggtggtagtaggtatacacaaggatcgctgcgccagtttggatcctcaacaccccggcgtctagccattgacgaaagccggtaggatttgtaatgaagaagtggggaagagagtactgaatgtgactgagttctgaaagattgtgaggcctcactcgttaaggcgacttatatatgcgcaaaaaatcgagtgatatccttgacatgtgaacgtggtggggcatggcgggtacgactgattggcgccgaaagttgcacgcttgatcggcgccgaaagttacgttggtcgtatgcggcaaatggcgggcaaatactcgtagagcatgcgaataaaggaggctgcatcggtgcgggagaaagcaatcgtgcatgcgccgaaaggtatcgtgcatgcgccgaaagatatcgtgcacatataacaacaacgtagtcattacataagcatacagtactggaaagtcaagcaaataaacaaagagaagattgctctactggccctgccccgcgccgcgaccacgcttggtcctccgggcctgtgctcgcacgtggtcctgggagtaggtgaaacgatccggtggcacagcacgggtagcacgagtgtctggcggaggagtggcctgcgcctggtcctgcgtctgcaccggcggtgcgcctcccagctgtgaggggccgatgacgtcctctgccgagcctgaagcgaagtcgaagtcagtgatgtcgaagagcacggtggaagacagcaagcggtccgacgaggtcctagcatggtctagtggtggaccttgactcgacgtgccggctgcctgtgacgaagccccggtgtactgctggaactgcgctgagtgcgaggtcgacgcagctggctgagacgctgaccctgcagcgtgggagaagtaggcggcctgcgtcatagcgaactgggcgaaacctacacatcgacaacgggaccttgtaagctaagacataaaatacatgtaaattgattatcgaagtaatgttgttttttaagtacctatggggggcacacctgaaggcctagccgaggaaggtggggtgctgaacggtgcacgaaaccctgaatcaatcggcaagtgaaacggctcacatatatgtgcgaggcatgtacagaaaaatccttaaaaatacttacctccgtgcggagggggagtcggcctaggaacgtgcgcagctggacggggaccagtcggtacgggtggccgctgtacagctgcgtctgcccgagcaatgtcgtctgcacgacaggtgagcactcggagaatcgagcgcatcgactccaccatccgcgtgtacgtcgtcaggtgctcctctacgggtaccggaatccctgcgtctaaacgttggatcgtcgttgaaccgtcaacgacgacccggttgatgtcgtcgacctgcatggttaatttgttcatacatattcgtaacatttgacgatgagaaagacatgaaaacataaaggaatggtgcgatgcagggtactcacagcacgagcgaagtcctggtcgcggtgcctagcatagaggtctctagtgctcgcaacgtggggctgctgctccaagggagcgaaggtgaccctagtacgggtgtgtggctggtaccagcgtaggtaggcctggtacgactcctcagtgtgtggctctccctcgtggtccacgacctcctcggttgcgagcaaccagtcctcaacaaaagtcgccaacttggcgggccagtcgccagctgactgctgacccttgcgtgagtacctacgaattaatgtgtaatattagtgtgaaacgacagatgttacaaattattgcaacaatggaaagcgtagtgcaagatcttaccggtgaacagcagctgggacggtggtcggaaacggtactggaaagggctgacggaagccgaactgccgcatcacgcggaaaggggcgtgaggctcaacgcagatgtcgaagaccatcggaaccgtagtcatccagtacgcctggtccctggtgcagagtgtggacagacccaacggcgcacgagcctgggtagccgcggcactgtagggctcccacacgacgtcaatcggcagaaggcggtcgaactccataacaaactcaggatacgaccgcctaatctggacgtgagcccatcggcgctgcaatacgagacgatcgatgtgatgtacaatgaacttagcaattaacttaacaatacgataagatcgatgcaacgtacctgacgacggcaccacagagtacccatcgtagggtagtcgacctctggtcgctcctcgtacagtgactcctcgtacgcgtgctggtccacctcagggcggccgatcgcaatcctctcagctgcccagatagaaagaaagagagggcacccaccaaaggtcgcgctgggatccgtcttcgtgcaagactcacaaagtgcacggtacagagccgccaacaacgcggaaccccagctccactgaggcacctcgcctaccgcggcgtcggcgatgctcctggcgtcgtgcacgagtcccttgtcgaccgcgtgcccgtgacggccacagaacatcacccagccaaaaagccagagcaagtacgcctccaaacatcggctgtaggagtactcgtcggcctccgcctgtagctgctcaacctgcaagcagtcgataaaatgttaggcaccttaactgcggactaaagatgtaatacgattgtcatttcggtaaaaaacactcacggtgaactgaagtagccacctcttcgtaggtccggtgttgcggtggtgtgccaacggctggagcgggaggtgcggtgcgcgctgtactagtgcgaaacgtgccgtcagttcgtcctgccagtctacagccgtggtcactggcccaacagcgtctcccgcgagcggtagccccaacaagcacgatacgtcctgtagggtaggggctacctcacctcacggcaagtgaaaagtgtgcgtctctggcctccatcggtcgaccaaagctgctaggagggacctgtccacagtccatcgtctggccgggtccgcatggccggcggcagcctccaccagccgacacatcggtaggaggccggcctcacgcagcctgcaataagaaattaatatgtcattacaaaaaatattacagcgcaactaatttatagtaatatactgttcgtacctctcgacgaaggagtcgtgaaccgtgagtagctcaccgcacgtccgtgcccggaacgtcccaagctgagccccctgcaccgcagtaaggtgagaccggtgtcggagatctatcgccgggtccaacagctgaggtgtatcctgacgtgccatctctgaaaaatatagtgtttcgtattagaacaattcaaaaagtagtaatgtaaaacaaaagatgactcgcaagttaatgaaatagtaaaaaaatcatgagaataattacgtacaacaagagtacagcctatttaaataaagcaaacgttactaatggtacataacgatgacgtgcaatttaacatatatgtagagttcgataatataacataacataacataatattacgtgtcgaagtccgacatacatcagcatacgtaaagacactaggtgccttagtctgacgttatatcacgagacctaaagacatgacaagccgaagtctgaaattacacgacgaaacataaacacatcgataagttcgaaacagattacaagcaaacccacatgccaacatagaacataagaactacaccacgtagccagacgtggcacgacgacgcctaggacgtggtcgagtggaggtagtgccttcacccgtagggcgagctccatctgctgctgatcctgatagtcatgcctccgccgcacttggtttctccttgtctttaggacaatgcttgtaggtgtgcccacgttcatcgcatttgctgcaacgcttcaccctgccagcctccgactcgtccatattgttgcagatgcgacgagtcctcctccttccagccttgcctcggagcttcgatgggtcaggaatattgagtacttcatcgttagtctctgtgaactccccagctatgccgaaccggtaaatctcgccgctccatgtatgatatattgcttgcttactgaagtactgcgacacatatactgcatctggtatgccacactccgctgcggcagcaatgacatgggtgcatggcctgtggagcagcttcggctttgaacaagagcaatgacatgtgccgtcggttttgagaacacactcctgcttcactctcttgcggtagatacccctgcctgccttatcttgacatagtatctcgaacctatgttgttgggtaccttgcactagagctcgatgtttcatggcctttttatgcaactcctctagctttttctgcatgaaagttccaaacaaaatgctgttgttcggcatagagggaagaattgcctggaaccgatccctaaaatacctgtatgtcccatgtaaaatgaactccactatgccaactagtggcagtccacggacaccgcgcatcacccagttgtaaacttctgccaaatttgttgtcattattccatatctagcaccaccggtgtcatacgccttggcccatttctcttttggttcatgcagaatccactgagaaaatttccgaatctccaatccagttcttctaaccaaagttggactatccgttggaagaggtccaagagcttgaggagggtcatcaacggcagtcgatggagccgctgcacgctgatcactgcatttggctgtcaactcatctaatctcttccaaagctcattgaattttttctcctggttctgattgcacagcctcctgaacatgttcacgagctccttgttcttgaattgcttgaagaaattagctcccatatgacgcatgcaccacctactctgtacatcgtcccaaacaccagggtatcctcgttccatgctcccaaactgcaactcttctatcgttcgcagaatgccagcgtgcctatcatgtatcaggcacacatttggcctcatactaacaacttttgttttaaccaatttcaggaaccagtaccagctgtcggtattctcactctcaacaaaagcaaatgccaagggaaatacctgattgttcccatttacccctattgctgtcagtatctggccccgatactttcctgtcaagaatgtcccatcaatgcagataactggacgacagttcacgaatgccatcttgcatgcatgtagagctaagaacgccctttgcagcacactcttgccaggatgttcaattgatgggaatttcttcacttcgtaagagctcccagggtttctttcctcgataacaccaagcaggcgtggcaaattgtcatacgagacttcgtatgttccaaatctcatctctattattttctgtttggccctccaggccttggcatagctaatagtatacttgtatgtctcctcgatgtgtcggattattgaccttggttcgtatgtgagattatcgatgacatgcgcatacatctcagatgcgacaaatgcacatgtaatgttcctgtggtatttctgaacaccaggtagaaaacatgtatgcttggtaacgactgacactgtccaataatccttccatttccccttatacgcgtgcactctccagggacaaccatctttttccttaacacaccgaacttcatattgcgaccggttggacttggcagcccaaaactctctatgaagtgacactgcaaaatgctttaccgcctccttcatatcttctgttctactataaatcgctccctgaataacctcattttctttgtattcccatctcacactatcctcttcagagacgatcagcccagaaaaatcctgactagcccattctgctggattaatatccgtctcctcatctgacgaatcaccttcctctacacgcccgttgtcagaatcctccctctccatttcatccacaatggctgcgacagtctccccctcgtcggccactccacctggttgaatgcccactggagctactacgcccccgtccactcctgcgttgacctcctccacagaagtctcatttacttcagcgcttggtccctcgctatcatccatgttcatctgcacacctggatccttcgggtgcacaaacggaaccaaagctagaggccacccacgttgcattgcattttccacataccatctccacacttgggagttttgaactggcattagttcccaattgcccgacttactataacattgattgttatgtcacttgtctgtggatcaactctcaaacccctcattaaccatccttttatagaaggtacactcctctcagccggtctctcaattcccctttctgatacaataaaatctgacagatctaccccagttggcccgtaacggacgtttcctggtccatggtaaacttgaaatattggtttgttcgacatatctgtcaacgaattaactagatcatattactctttcatgcaataaacatctacaacgtaatatcttcttgtgtaagccaatgcaacggtaaaatattgattccaaactagcagatctacgttgttaccgatatctacaatacgcacttctaaattagtacaactaaaaccataaaaatataatgcatttattcaaataaattttttaaaaatacacactatttaactcaatagtcacatataggatctacgaatattacctgaaatcggcgtctgaatccggcagggcttcgccccttcttctcttctcctcccctctcttctttttttttcactggatttgagaggtgaggaatgagggctgggggctgggtggcaggccttttataggcagcgaggcctgccgcccggccagagggcggcaaggggccgcctgcaaaatggccggccccctgccgctcttttgcattcggaccccttgccgccccaccagagagcggcaagggttttcatgcaaaaaacccaccctccgtcaacgcccgttcctcccccgtttgtcacgtcagcttgccgcccaccattggggcggcagggtctatttttgcaatttttctcgccgatagattatttctgtaaatattaaaaaaaatctaaaaaggaaaaaaattccgcatttgtacggatcctctcccggcccaaatggcccaaacaaatccgatccagccagcagcccgaggcccatgttggaggcccggtcgatctcctacaggcgatctgaagaaccatctcctcaccatcctcgccggccaaactgcggcctccaacacgcgccggcgggcggaggctcgcggcagatgcgcccggcaggtcaggccgccgccgtagcccgtagatagggtgcgcgcaggacggagctgttcgtggaggccgtggggtatgcgctcttgaggtaaatcaaagcttcttggttgattctcctgtctttgtttagggattgggacgtggctgcaaaaactttggttgagatttctggcatttctcgatgcggattagcggcccactcgttgtaaatcacacatgaaaaatattcgaaattgtttagggattggggcgtggcagcaaaaactttggtagccactaattaatacaagaacattttgcattcacgtatgattgtaagacgatgcatttactaacagatttcagtttacttcagtcctccccgcaaaaaaataaaaaataaaaaataaaaaagagagagagtttaattctcagtgttgtaaactcatagtagaaggagcatcatttgattagcacactttgttttgtgtggtaaattaacatcttgcatcttatatattgtggatcaggccatataacttatttcttttttgcaatatgtatgacttgaaaatgcttgttttctttttgcataattgatgctagctaatttggagaatttgatctctcaatatggatatgtttacagctatatttagctgatattatgttgatgtacattttggctttctgctaacaagttgtgtactatttccagtccaaagagagatctttttttttttttttttttggggcaaagagagatctctttaacaagctaagttttgtataactgtgtgagtggagctaaaatgataatataaagctttgattgggatgtgaaaatccatgggtggactcaggtgcatggggtctatcaagaatttagataattattgttagcaaacatgttttaagtgttcctctgctttgtccagtacctttgtgtattgtcacattgctattagctttaggagcaagataagggctaaagatcaaataggttccagcaatgccaaatatttcaccatgttacaaacaccaatattggttaaagtttctaagtattttggtttgttccatttggtttttggcagcttcagtatggtttttgtgagctaactttttattgaaaattttgctttgcattgcccagatgtctaatctatcagagccctcaaaagaagctgtgtcagctgacgattcaagtgctgtccagaaaactggagcatggagtaacacgttgaacattcttctgcaacaaacttcagtctatggtgtggctgctggttattgcctgtcagcatctctgctctccattatcaacaaatgggcagtcatgaaatttccttaccctggagcattgacagctttacagtacttcactagtgttgttggagttctcttatgtggacaactaaagcttattgagcatgatggccttaatttgaggaccatgtggaagttcttgcctgctgctgtgatgttctacatctccatcttcacaaacagtgaacttctactccatgccaatgtggacactttcatcgtgtttcgctctgctgtgccaatttttgtggccattggagagaccttttatcttcaccaaccatggccatcactcaagacatggctttcgctttcaactatacttggtggaagtgtgatctatgttttcacagacaaccagttcactgtgactgcttacacttgggcagtggcatatcttgcaagcatgtccattgactttgtctacatcaagcacgttgtcatgaccattggcctgaacacatggggccttgtgctttacaacaatctggaagctttcatgctcttccctcttgagatgcttctaacgggggagcttaatcagatgaagggcgacaatgctaaagtgacaaactggctttcatctgatgtcattcttcctgttgctctgtcgtgcttgttcgggctatctatatccttcttcgggttctcctgcagacgggctatctcggcaactggatttaccgtgctcggtatagtgaacaagctcctgactgttgtgattaatctccttatctgggacaagcatgcctcctttgtgggaacaattgggctcttgatctgcatgtccggtagtgttctctaccagcagtccaccacaaaaccaaaggcccccaaggctgagccaaaagaggagaatgatgaggagcagcagaagttgctggagatgcagcaagggcatgaaagcagctcaactcagaagcaaacatcatcttaagcctggtagaaaatttggcattgatatcttaagacagcttccctgaaccatttgggatgcttgggaaggatcatttggccaaaggatattcattcgttatatgagaaccttgaaatgccgttggcatgaaaaatcgcagagaaaacttaatgtcactttgcaattctttgtttagtagtataccgtatttatttgttagacctgtggtagggtatcaattatcaaagaatcccgaaacatagtcgaactggattcttcgtatacaatgtgctgtttcattgataatacagggtggttacccatttctatacaggacgcgcccggcagggcaggccgcaggcgatagcgtcggcgtgcaggaaacgagggtcacgtaccctgagtctcggactccgtgaggctgtgggctatatatgctcttgaggtaaaaccaaagctgcttggttgattatccagtcttgtttagggattgggatgtcgctgcgaaaaaaatggtaagatttatggtgtttctggatgcggtattgcagtctcggttgcagattagcggcccgctcgtggtaaattgcagatagtagtagtatttatttgagaataatacaagaagtcaagaacaatttgcattcacgtataattgcgacaagattcatgtacttagtatcagatttcagtacacttcagtcccttccaattttctactgtttggagcagactgtatctaactgaatttcactaccagataacagagctggacaatcgaggtatttgggtttgcctgcggtgttcatcttgctggtgatggagccactgaatcagccttgctagagtaagaaccacatagagatcactacctattgcttatctaggaaccagcatgtgcacggtacgcattgttgattgacttggtcataactagtttagccaaaatatttgtacatgattatctgatcatatagcacacctactccaaagaacacaccaaatgcaattgcaaacactaccttgtcgatatactgctttgtcaagatagtggaggttggagctgcttctgctgaattgcagtggtgtacaagcatagggctgcatagctttgggtttccagcaaaactagaacttggaaatgtgctgaactggtctccgcttggtacaggccctttaaggtcattgtaggaaacgttgaattcggaaaggaagtgaaggttcaccattgctggagggattgcacctgtcagatggttgtatgacaggtctagaaccatcaggttcttgaggttgctgatcgattctgggatctctccatttaagttgttgaagctcaagttgagtgaaacaagttcttttaactcaccaatctccatggggatcacaccagtgaaattgttgttacctagattcaacatttcagggagagcagtagttgtatgatactgcaaacacaaacatgcacccgcataaaacgaaaatgtaaatgctctttgttctgagttatctgcaaccttgtctgactttagcattggcatctccattagtgccgctggtatttctcctgtaaggctattattggatacatccacatacttaaggaagttaaggctattgatccaggtcggtattggtccactgagttgattgctgtataaagttaaaacctgcaaatttctgagttttgataaccaattaggtatcttaccatacagtgcacaacgctctatggcaagaccctgaatattctcaaaaccatcaattgcttcatcctgtggcatagcttcattcttgaagttgctccccataaacaagacagtgaggttccttaagctcttgagtatgtgaagggtattagttatgtttgtaaaattgttgtaggaaatagataagaaggtgatcgacttaagatttcctatattttttgacaactggccatgaagcctattggcagataggcgcaaccaagtcaaattgctgcatgagtagatgctctctggaatggtgccgttgaaattattccaggaaaaatctaatgctttcagattgggcaggttggagaagttaactttggcaagctctcctgtgaacttgttggtgctgaggttgatgattactagatttgtgcagtcgcccaaggatgctggaagctctccagataagttgttgctgctaatgtgaagctcctttagtctctttagctgaccaatagaatttgggattttgccactgaatctgttccagccaagatcaacaaaaacaagattactgagctttatgatgagtgaaccattaattgttccttgcaaaccgttgttagcaaaagagaggtactccaatgatgtggcatggaagagatcatccgggagggccccgctaatgttgttgttaccagcttttagcattctaagggcagtgcagttacctattcctggggggatgctgccactgaactgattgtagccaatgtcaataacagcaaaagatggcgagccgatgcagaaagaggaaggtatatgcccagtaaaactgttgttgctcacgttgattgcaaccaggttgctcattttctcccatgtgctggagggaaatgctcctgtaaactggttgcttgagatattcagtacctgcagtggctggttagatactgatgaattcagctcttgcaggttgccgttgaggtggttgaagctgacatcaaggacaacgatgctaccagaggacatcagctctgccggaaggccaccggagagcgagttgtacgacaagttgaggcgcgacaagctggtgagctctcccagcgacggtgagatcctcccttcaaggcctttagaggcaagagagacctcaatgacagccccatcttcactgcaggtgatgccttcccactcgcagcagtccatgccattccgccatgacatggcgatgccattgtcgtgtgatagcccagcaaggaaccggaggagagagctcttctcctgctcgaggcacgcaatggtggagacggccatggggagcaggaacagcagcagacataacgaggaagcagcgaggccagagaaaggcatcactaccctgcttctccacgcagaatggggtgccatcttcatggtctctcttatcacaggtctttggagttgaatttggcagctaatgttcgcgaaaattacattgttcgttgagcatatatgtacacaactgaatgcatatattatgtacttaactgaattattgtttcgtttgaagtccggagatattgattttgtgttcgcagccataggacttgtgagccatactgctacctgtcataccatttttattttctgtgcagccttactttgtcaactagagcatgtgatcctacctctgtgtggtccaagttgaatgtacagtttcttcttgataagtacattgcagaggtttcattctccctagtgtcggttgttctttctaagtagtattttgttgtctcttgtggagaatttcaacaaagtttgtgaaaatgttttatgttgcaaagacaggtctggtttctctcattggtcgatcccagattacctcagtaatatgaagttgtgcattaattttgccttccagaacacgtccgcttgggtagcaattcatgtttgctatgtacattgcaaaatttcatccattgtggcaagattgaattggtgctaagattaacctggcatttttcattgatcttgttcacttgtgcagttatgagacttttggttctgactatcatgttcttggttgttcagttggtctgtcacatgaactggacggtcggaatttgaatattgatatacttcaagcctgtagtcattttagattttttttttccgcagattgttaacgcatttggatgaatttcatgcaaaatgacatgtttgttgcacttcgtgcaaacagcacgctcatcagaaattctgaataaattaactatcaaatgctggtcaggatcactgatcatatttacttccagataggactaatcatgtacttcctctgtcccatagaaaactcagtcctagatttaaatctagatatagtttagattcaaacccaatcctaaatttaaatctgcacaatcacaatgagtcgtttgcaataaataagagttcagacaaaggaacgaatacacacgaatccaaattattttcaaggaggagaatgataatgtcagtcaaataagctgctgttagacattgaatgccgcttgaaatgatggatggattggccccaaactttgataacggaggggaaaaaattttctgacctttgacaggctagtgtcgcgaagcagcctcttggtccaggggcccatggcaacgacgacgccattaacaaacctgagaatgtagatcgaccgagtcaagatcagcagctccatagtttcttttattcttatacttattcgtaccacctattaacaacctaaaaataatttataaataaaacttttataaacatgtttttaacgttaaaaaaatgttgtaaaataaaatactatggaaaaaactacaaaatcaacttcaaaattaaactttaaaatttaaaatttggtttaaaaacttaagtataagagaaacaagggccgcaggtcactaactatttaagctaaaatagttggtcaagactaaactggtcatacatcactcatattccaaagaccgaaggcggcggtcagagatgaatttatgatatacttatttctcttattcgctccatctttaatcttatcttactataactactagcaatttaatgttcactaacttctaaaactcaacgtataagagcaaggctaataatacagccgacctgttagctataaggttttttatagccttctcttagcctacccatataatagttagcttataatcaatatagggctcacttgtctccctcacagaatttcttggttcttatgtctaaaccggctgtaagtttacagcccgattctcctctctctcctcttttttctccttcaccttagcatttagccggcttatagcctactattatacttgctctaagtattcacatcatcattcactaacaattattatttagagtattttaaattacatgcaaatgtaccacatcatcacccactagcaattattatgtagagtattttaaatatcatgcaaacaatgctatatcatttataattttgttgtatttttagaactcaatatgcaagcaatgtcaaatcattattttcacatcatttaaatatacacatctatcatttttataatgtataacatacatttatccacatatttcgtagcagagcgcgaggtatcatctactcccttcattccaaaatataaggcacaaccatccttaacccaaagaccaagaaataattattatcacctctttctttgaatcatcccaactaatataacacatgcacccaatagaattaaacatcttgtgattataggatttaaaaaataatagtttaggagagaggaggtgctattaattgtcatgcatgcatgcacgtcttatattatgaaacacctttaaaaagtagttgtgccctatattttgaaacgaatggagtagcttaatagcagtatcttctcatcatctttgatgatattatttaacttatcaaatatgacatactatattatatattcatggtagcttataactcgcttcaaataacaaaaatgtcccctattattaacctttttgttagtaaattgtattttgcaccggataaatgtgtcgcgtttcgctttacaccaggttttgcatgtagtttagcacatactttttcacttagcatcaagttatattgaaataagtttcacttaacaccaagatataccaacaaacctattaaaatttcatgaaagctcataaagttcttaaggaaacgttgtgaaacattgtataaattgaagaagtttcaaaagttttacttatattttacaagattttcttttagttatatgacgcaacctagtgcaaagtttgcaaagttgtagcgtgaaagtaggtgctaaacataaagctacgtaaaaagttttttaaaaaatgtaaattcatgtgtaaagcgcaatttatttttcttaactacgaaggcttcttacactgagccatggcagcagaactgatttctggtccagtaataggtgatgatgggctggctatgctggactagaaatcatcaattcaggacatgaagccgaaccgccatttctggtgtggtgatgaagattctactcatcggggttcaaaaatcatgatgcccataatattattatgcacatgtaggtgtgctttcaacaggattttagtaagatcatgaatgtgctgttggtttttgtctcttagagcatatgttaggggacacattcgcagggatgtgagtgatgttgcgtgcttagtggtgtgtgcgcgcgtgtgtgattgctgtgatatctaaaaaaaccgccatttgttatgcaaacatgccacgtggactccatattagctaaaaccatcatttaaatagctaagggcttgatttacactagttttaaaagttgagagtgttattaaatactccctccgtcccataatataagggattttgagtttttgtttgcaacgtttgaccactcgtcttattcaaaattttttgaaattattatttattttatttgtgacttactttattatctactgtactttaaacacaacatttcattttttatatttgcaaaaaaaaaattgaataagatgaatggtcaaacgttgcaaacaaaaactcaaaatctcttatattatgcaacggagggagtatatatctggttttgtggttaagggacttaaatgaaactcgacctctgatgaaggaaccaatggtgaactttttcctgagctgtgtgctcccggcccaaacggctggacatgaagcccgtatggcccaaacaaattagcccaagtcagcatcgcacaccaaaaaaaaaaaaaaaagtcccaccgccggcggcggcggcggcggacgagcccggcagcggcagggcaggccacaggcgatatggtcggcgaggctcacatcccgtgactacatggaggccgtgggctatgctcttgaggtaaatcaaagctgcctggctgattgattctccagtttcgtttagagattggcaccgtggttgcaaaattttggttgagatttatggcatttctcgatgcggtattgcagtgtcattggttgcggattagcggaccgctcgtggtaagtagcagataaattattcgaaatatagtcacaaattagtacaagaacatttctgtaagaataatacaagaacaatttggatgtattcattgtatgtataatcgtgacatgaataatttaccagcagatctcagttcagtcagccccttccaattgtaatttttggagcagactgtattaactgaacttttaactaccagatcacgagctggtcagtcggaggattcatcttgctggggttggagccactgaatcaagccttgctttttgccgggtcggccgaaggaacggcgaccaaatttcattaaggaattgggggaagaacaaaaaaaaattacagatagattaggcttacaatcgaaggaatcaagccttgctgaaatgagaaccaattgaggttactacccatttcttatctatgaaccagcacagcacacattatttattgacttgatcataactggtttagccaaaatatctgggcattattagctgatcatatagcacacctactccaaagaatacaccaaatgcaattgcaaagacaacctggtcgatatactgctttcttgaggtaggggaagttggagctgcttctgccaaattgcaatggtgtacaagcatagggctacatagctttgggttcccagcaaaactagaacttggaaatgtgctgaactggcctccaattggtacaggcccttcaaggtcattgtaggaaatgttgaattcagaaaggaagtgaaggctcaccagtgctgatgggattgcacctgtaagatggttgtatgacaggtctagaaccatcagatttctgaggttggtcaccaattgtgggatttccccgtttaggttgttgaagctcaagttgagtgaaacgagtgcttttaactcaccaatctccatggggatggcaccagttaatttgttgttacctagattcaacattttagggaaagcggtaattgtacggtactgaaaacacatacaacctacataaactggaaactgaaagagtcttgggtctgtgtaatctgcaatcttgtctgattttagcattggcatctccgttagtgctgccggtatttctcctgaaaggctattattggatatgtctacatacttgaggaagtttaggctattgatccaggttggtataggtccactgagttgattgttgtataaaactaaaacctgcaaatttctgagctttgagaaccaattaggtacttttccagacagtgcacagtcgtttatcccaagacctagaatattcttgaaaccatcaattttttcatcctgtggcatagcttcattcttgaagttgctccccataaacaagacactgaggttccttaagctcttgagtatgtgaagggtattagttatgtttgtaaaattgttgtaggaaatagataagaatatgatagacttcagatttcctatattctttgtcagctggccatgaagcctattggcagataggcgcaacgaagtcaaattgctgcatgagtagatgctctctggaatggtgccggtgaaatcattcccggaaaaatctaatgctttcagattgggcaggttggagaagttaacattggcaagctctcctgtgaacttgttgctgctgaggttgatggttactagatatgtgcactcgcccaaggatgacggcagctctccagataagttgttgctgctcatgtgaagctcctctagcctctttagctggccaatagaatttgggatcttgccactggatctattccagccaagatcaacaaaaacaagattactgagctttattatgagtgcaccattaattgttccttgcaaaccattgttagcaaaggagaggtactccaatgaagtggcactgaagagatcatctggcagggtcccaatgatgttgttgtgaccagcctttagcattctaagggaacagcatttacctatcccatgggggatgttgccactgaattggttgtaagaaagatcaagcatagcaaaggatgatgagctgatacaaaaagtggaaggtatgtagccagtaaaactgttgttgctcgcattgattgcaaacaggttgctcattttctcccatgtggtggacggaaatgctcccgtaaacaggttgctcgagatattcagtacctggagaggccggtcaggtgatgacgaattcagctcatgtagttctccatctaggcggttgaagctgacatcaaggacgacgatgctgctagtggatatcagctctgatggaagcccatcggagagcaagttgtacgacaggttgagtcgcgacaagctggtaagctcgctcagggatgatgagatgcacccttgtaggcctcttgaggccagtaatagctcagttactgcaccatcttctccacagattatcccttcccaggtgcaacaatttggactattctgccatgacacggcgaggccaccatcttgtgataacccagcgaggaaccggaggagggaatgtctctcctgcttggtgcatgaatcaacaggagagatgaaagtcagcagcagcaacacaagagcaggatcaaagaaatttatgcaaaaccttctggttttgttgctgcgccaagactgcggcttcatggtttgtatcttttggaagctgtgacagaatagtgagcttgatatacctaggtaggctggtattgtgtgcaaaaccacagttcctgagctatattggcaaagcatcgaagagttataagctgatggagtgttgacctatgagtttagttgcttctacctcactggcttggtactgtgcttaggtttgggaattccgtctttctgttttcttttcccaatcttatgtattggttcatgaagcttgacaggagtgcttccacttaaggccttgttcagtttagaagggattaaatggggttggagaggattgagggagaataattccacaccacaataggtgtggaataaatcccttcaatctctccctcatggggatcaactgaacatgccctaaatcggatttttcctcttacagttaccacttgactactatttgttaattttttgccgggttactatttgttaaattctccattcgtttagtcctaaagcagagtcatagtccaggtctatgccctctagtgatttccttattcttttttttcctagatggaggtatggcgtacaggcgtacagccgagcaccgtgcttctaatctcagtaattccagcagctgcatttgagtcctttgtcaacaatggatttgtgactgttgactgttcttggcttgcgataatcttttacagcaatcaaaagattgacctcagttggttacattacctcttctttttctttttatcttgaaacggtttggctacactactaaaacagtaattgatgcaggtatagtacatgattgtgtgctgctggaatgcttttgcttttgcatggctgaacaaagtttgctcaaggcttcaagtttcaagtaaaggttgtgttgtaagcctgtacagcggtagtgctatctaatagtagtctattgttctcatttccttttcagttcatgaccctcgttgttctatacaaaatttcaacaaagtctgtgaaatttctttcacagacagttcttacatttgcatattcagacggtctgatattatcttagatcgtgtcagctctcataatgagcttgtatattatatcttggtgcttagtttcggactgctacctaaaggtaactatatattttgggacggagctattaattttctttttcagcagcttgttggtacatttggatgaattctgcgcaagatgacatgcttgttgtactttgtgcaatagcatgctcatcagaaattgagaataagatgccttatcaaatgctgatcaggatatcaccagggtttaccaaatcgtgcggttatcgctgacggagctcgtggctcctcaccgggagaccgcgcaggcccccctttgccagttcggccgggggcttagggtgagatcccaagctctctctctctctctgtatgtggaaagatcgtctgttcgcaagagaactcgagacacggcgatgtatacaggttcgggccgccgcgaagcgtaataccctactcctgtgtttttgtggatttgtgtatggatgagctacaaagtgtgagccgacttctcccccgctctaggctctaaatctggcaagaatcaaccccccccccttctctatgggcaaggtcctccttttatacttcaaggggataccacatgcacccttccctttccaaactggactgttctttttctcttgaacgggcggagatcagcacggttgctgtccgaatgacgctccgatgggacagcccacacctacctccacttccgccgggggcaggtgcgtcgtgggaacgtggttgcgagctgacgacatgagcagtgtcaaaccggtcacaaatcggtcattcttgtccgccgcgtgtcagcttagcagtgtgcatgtttgcccttcttcgtgtaacaccttgcctgtaatggttaggatgaagcctggcataaatctaaccagggctaacgtgccatctctaagagataacacgctagctccggcttgagacgagttgcctagaggctttcgtcttgacgggatggggcaaggcgtgtgtcagaccgccagtcgccacctaacccttgatctgaccggtctgtgactggtcacagaccggataaaagagcgtgctgcactgcgttgcacgcagcgtaacacgcttgaccagactgcaataaatgctgttaggtgagcacagctgtgctcacttatcccatatatatggcgcagacttctttaaggggtcggggtgcctcggccctcggggccggggcaagcgcaacccgaccccccctcgggggaaatcacgaggagggcggacacctcaccctcgggcccaatcgtccccgaaggtgccaggccacgtgggcgattgcgtctgcctcaagcctctggtcatgatactcccggtcccatatcaccgacagtagcccccggcgttacgccagagcaattttcccttcccaagggaagcggtcaggtgtgacgccaccattaaagcctggtgacaggtgggaccggtctccgtagttgggcaaaatgcccaacggtctcaatccatgcacattggtattgataactttggttatccataatgggcggtctattcaagactgccacaccacttgagcagcgcgcgaatctgggcgagcagatttgtctcgctcggagatacggtaacgccgcttcggtcggcgagcgtaattaacgcgcgcacgatacgatccgtttcgattgccacaaccgcatatccacttcacgcgccgtaagcgggcgaatgggattagtggaagcgtgggcacgggaaacgagggagcgagatagcgagatacgagggagcgaagtagtgggcgcgagaaacgaggagccaggcccagcgatagcaagggtataaaagcatcgagaaaaggatttgctcccttcctttcgccattgttcctcttgccttcgccgcctgagctctaactctttctctgctacgccctactttcgccacacacgctcgttcccaatcatctcttcctccaccgccatggcacggggctctgctctgctcgacggcagtgtactgccgccttcccgcatcgtgaatgagaggcacgccggactgccgcgccgcttcatgccggagtccgctaccggtcgggagatagtgatgttgggcgaggggcgcccggcaccagactacccggggcggtccatcttcttcctccccttcgcaatggctgggctggtcccgccattttctcatttcttcatggatgtcctggagttctacgatctccagatggcgcacctcacccccaatgcggtgatgacactggccatcttcgcgcacctgtgcgagatgttcattggggtgcgcccctctcttcagctgttccggtggttcttcaccgtgcagtcggtgtcgccgccgtcggtggttggcggctgctacttccagccgcgggggccggtgctgaaccgctacatcccctgcgtcctccgcaagaagtgggacgactggaagagcgactggttctacacccccctcgccgacgaagcgcgcctccgccttccaagccagcccccggcgcaggtctccagctggcgggcgccggcagatctgggggaggagtacgacgccgtcctcgaccgtctagcgggcctgcgatcccaggggctcaccggggccatggtgtacggcgattacctccgtcgccggattgcgccgctccaacggcgcgcccggagcgcctgggagtacaccgggccagaagattacatgcggacccaccagggagccagatgggattgggctcccgaggacttcaagatcgtggtccaaagggtgctaaatcttagctccgcggaggcgtctcgccttcctcaggagatcctccccctctgcaccgaccccgaccgcgtctccattctctccattatgttgggggtcggggcctcagaggagagagcccctaagggccacgacggcgcgggcgagcgccgccgggggaaacagtctgccccaggagggggtcgtgcttctgggcctcgcgtcgggggcccggggagcagccgccctgccgacgcccaggggaagaggaagctgggaggaacgcctcccccatctcctccccgagggggcggggcggcgcgtgccagcaatcggcgcccggagggggccgcgctgacgtcgcaacccgagggggagcgcaagaagaagcggctccgcaaaatgggggagacggaaccagcccggggaaacctaatttcccccccaaggtggtcattcacccgaccccctcgcaggttcgtctcactctcattgcatccacctttctcaaaaaagaagttttttcttgctcactttgttcgtcttctggttttttattctgcttcagcgatgtcccatcgcactcctcccgccaccccaagtctggccagtccgaggccgaagatgcggcggccgcagaagagcggaggcgagaagctgaccggcgtgaagccgcagcccgccttcgggaagctgaagaggccgcccgggaggccgcccgggttcgccaagcagaggaagctgctcgggaggaggccgcccgggcccgccaagccgaagaagctgcccgggaggaggccgcccgggctcgccaggctgaggcggcagcgtcacttgggcccactccctcgggcggccctcaggcgacatcctccgaggcggcccgcgacgaggccgcgggcgcatcgcctgggcctacctcaccgggcgacgcccaggaccaaacgggcccgggggacatccccgagcccagcgcatcctccggggggccaagccgcgtcgccttttctccaaggcggcttttctcctcctcttccatcgccccggtgagcgctgagcccattatgcaggccttggccgccgcaaacaccgcggtgctagatggatttagcgcccaggtggaggccttgcgagcggaacgagcggagctcgaggccgcatgggcgcgcgtcgaggaggggcggcgctcggtggacgccatggtggaggtgggccgtaaggcccaccgtcgccacatctcggagcttgaagcccgcaaggcggcgctggcggagatcgcccgagaggtggaggaggagcgagaggccgccctcgtcgccaccaccgcgatggtcgaggcgcaagacagcctccgccttcaacacgcaagctgggaggcggagctgaagaacaagctcgacgccgcccaaggggttctcgactccgccgctgcccgagagcggcgggcaacggaggccgaagcggcgtcccggcggcgcgaggaggcccttgaggcccgtgccatggcgctggaagaacacgccggcactgtggagaaaggcttctcggaccgcgaggccgccattgctctccgggagacgacgctggcggcgcacgaggccgtctgcgccgaggaggagtccgcgctccgccttcgcgaggatgcactcgctgagcgggagcgagctctcgaggaggccgaggccacgacgcaacggctggcggacagcctctccctccgcgaggcggcgcaagaggagcaggcgcgccgcaacctcgaatgcgtccgcgccgagagagccgcgctggagcagcgggctgctgacctcgaggcgcgggagaaggagctagacgcgagggcgcctaccggcggggcggccgcgggcgaaaacgacttagtcgcccgcctcgcagctgccgaacacaccgtcgcggagatgcagcgagcgctggactcctccaccggggaggccgaggcccttcgcttggcgggcgagattgggcccgacatgctttgggatgcggtctcccgcatgaagcgcgccggtcggcaagcgggcctctgggggggccagacgtcggtgccccccaccaatctagaaggcctcgccccgcacctcaacaggatggcttgggttctcgagcaactccccgaggagcttgagaagaccatcaaggcatcctcgagggacctcgcccggggggcggtcgaactcgtgctggcgagttaccaggcccgggaccccaacttctccccctggatggcgctggaggagttccctcccgggaccgaggacgacgcgcgcgcgcgggtcggagatgccgccgaccacatcgtcaacggcttcgagggctcggctcctcggctcgcgttcgcccccggctccgacgaggagggcgacgccagcggcgaggacgatggtggcgacgaggccggcgacccgggcgcatttgaatgagcccccaggcccccgccaatcttaacttttttctttttctttcttctaaggccttcatgccttttttgtataaatcaacttaatctgcaatgagaaatgatgaaaaaatttttgtgttagttttattttgctatatatatgagttgaggatgatctgtgccatggtccttttgcgccttagcttgaaataagggctcgcgcccaagtgccggtcctcgaatggctcgggtcggggctagtgcctggggagatccacatgtcaagactggccaggccgggaacgtggtgaccgaggggtatgggtgacccgattgtgggtttttgccggttcccccccggagttcaccacgccccggggcacggctcggttctgggccccgtttggcgattttagctggccgaaccgagcccccgagggcggggttgagcatgagtgacattatttcaagtccagattcttcaaaaggaaaaaacagcacagacacaacctttaggaaattgaaactgcttttattgaaatgctgaaaggaatatatgtgcatgtgtggtagcccccggctaacccggcacacccaaggggggtgcggggttagcccgagccaaaacctgacacccgaccccccccttcaggggtagaagcgacgaaggtgttcaatattccacgggtttggcagctccgtgccgtcgcccgtggccagccgtacggagcccggccgggggacgccgatcactcgatacggaccctcccacattggtgagagcttgctcaatccagcacgcgtttggacgcggcgtaggacgaggtcgtcgacgcagagtgatcgggcccggacgtggcgctgatggtagcgccgcaagctctgctggtagcgcgcagctcggagggccgcgcgccgccttcgctcttccaagtagtcgaggtcatctctacgaagctgatcttgatcagcctcgcagtacatggtggcccgaggagacctcagggtgagctcagatgggagaaccgcttctgcgccgtagacgaggaagaaaggcgtttccccggtcgctcggcttggtgtggttcggttcgcccagagcaccgctggcaactcctcgatccatgaatcgccgtgcttcttgagaatattgaaggtcttggttttaaggcctttgaggatttctgcattggcgcgctccacttggccattgcttctggggtgggcaggtgaggcgaagcagagtttgatgcccatgtcttcgcagtagtcgccgaagagttcactagtgaattgggcgccattatccgtaataatacggttaggcactccaaaacgggccgtgatgcccttaataaatttaagagcagagtgcttatcgatcttgacaaccggataagcctcgggccacttagtgaacttgtcgatcgcaacatacagatactcaaacccgcccggggcccgtctgaatggtcccaggatatcaagcccccagacagcaaatggccatgacagtggtatgatctgcagggcctgggccggctgatggatttgcttggcgtggaactgacacgctctgcatcgccggaccagatcgactgcgtcattgagagctgtcggccaataaaatccttgacgaaaggccttgccgaccagggtgcgcgaggcagaatgggctccgcactcgccctcatggatgtcagcaagaagctcaacgccttgttcctgaggaatgcacttcaggaggattccgttagccgcgcgccgatagagggtcccttctaccagcacgtaacgtttggaaacgcgttgtacacgttcactcccttcgcggtcctcaggtagagtcttatctgtgaggtatgtttggatctcagagatccaagcaaccaatctaagggagcttggagcgcttccttcgggtcccgaggcctggactccgacgggcctcgggggccggtcaggcgcatccgtctcccctaaggggtcgggtcgcgccgacggctgggtaagcctttcttcaaaggcgcccggtggggtctgggctcgcgaggacgcgagccgtgagagttcgtcggcagccatgttatcccttctgggtacatgccgaagttctatcccatcgaaatggcgctccatacgccgcacttggcgtacgtaggcgtccatctgtgggtcagagcaccggtactccttacagacctggttaacgactagctgggagtcgcctaataccaaaaggcggcggatccccagtccagctgccactctgagtccggcaaggagtccctcgtactctgccatattgttagtcgctcgaaagtcgagacggactaagtatctgaggacgtctccgtttggagaggtcaacgtgacccctgcaccggcgccctggagagacagagaaccgtcgaactgcatcacccagtgggcggtttgaagcagctgagaggggttcatactggcctcgggtattgagacggtctctggagccggggtccactctgccacaaaatcggcgagggcctggctcttgatagcgtggcgtggttcaaagtgcagatcgaactcagaaagctcgattgcccattttaccactcgtcctgtaccctctcgattatgcaagatttgaccgagggggtaagacgtaaccacagtgacccgatgcgcctggaaataatggcgcagtttcctcgaggccatcagaatagcgtaaagcatcttctgggcctgtgggtatcgggtcttggcgtcccggagggcctcactaacaaagtagacaggccgctgcacctttcggcggggccgatcctcttctctaggggccgtacccccggggcattcttcgtccaagtggcccctcggggcgcactcgtcttctgtgccgatgacctcggggtcggaggacgacaggagcggccttcccacagtggcctcggggccgtcctgggggtcgggggctcctggcatcgtcggacaagcgggcaaagggccaactccggtcgtcaggggcctctggcctccgttcggctcgggggcctcttctccccgctttttcccgggccaagtcggcacagggttagcctcggggtcaaagggcgttaagtgcggccttcccgcagtggcctcggggccctcctgagggtcgggggcacccatcaccgtctgacaagcgggcagagggccgactccggtcgtcgggggccttcggccgccgttcgactcgggggcctctcctccctgcctgctcccgggccaagttagcacagaatggggatgcgccgaatgaggattgtcctcatcgcgctccacaaccaacgctgcactaactacttggggggtcgctgctaggtaaagtagcagggactcatttggctccggggcgactagaaccggaggagagctgagatacgccttcaactgggcgagggcattttcagcttcctccgtccaagtgaacggccccgagcgcttgaggagcttaaacaagggtagcgccttctctcccagccttgatatgaaacgacttagggcggccatgcaaccagtgacgcattgcacatccctaagtttgctgggggggcgcatccgctcgatagctcgaatcttctcggggttggcctcaatgcctcgggcagagaccaagaacccgagaagcttgcccgcaggtacaccaaacacacacttatcggggttcagctttatgcgggcggagcggaggttctcaaaagtttccgctagatctgaaagtaaagtttcttggttgcgcgtttttacaaccaagtcatcgacatacgcctcaacattacgtcctatttggctacccaaagaaattcgagtagtacgctgaaaagtaggacctgcattttttaacccgaagggcattgatgtataacaataggttcctacgggggtaatgaacgcagttttctcctcatcctccctagccatgcgaatctgatggtaaccagagtatgcatctagaaaacacaaaaggtcgcaccccgcagtggagtcgacgatctgatctatgcgaggcaggggataaggatccttaggacatgccttgttaaggtcggtgtagtcgatgcacatccgaagcttgccgttcgccttgggaacgaccaccgggttcgccagccactccggatggatgacttcacggatgaatccggcctccagaagtctcgccacctcctcgcggatgaaggcttgacgttccggggcctgccgccgcactttctgccggaccggccttgcacccggccgcacggcgagacggtgctcaatcacctccctggggaccccgggcatgtccgctggtctccatgcgaagacgtcagcgtttgcccgcaggaaggagacgagcgcgtcttcctatttgccatccagaagaccaccgatccgtgtggtcttggatgggccgtcgcccaaggcaacctccttgaccgggacctcgtcgcatgtggccatccgctgcctcggggtggcgggggcagaggggccaagcctctcgtcaccaccctcgggcttggacgcagcagcgaggcggtccgcgcgctgctccatacaagcgagcgcgactttaaggtcgccacggacagagatggggccaccggggcccggcatcttcatctggaggtaggcgtagtggaccgccgccatgaacttcaccaacgcgggcctccctaggaccgcgttgtagggcagactgaggtccgccacatcgaagctcacccgctccgtgcggaagttggcgggtccaccgaaggtgaccggtaggtcgatgtgacctaacggccatgtgtgccccggcgtcacaccgatgattggttgagacggctggagctccatccccggggccttgatagcatcaaaggccgcgggagaaaggatgttgagggccgctcctccatctatgaggacacgtcccaacttcacgttgcagatggtgggggaaaccaccatcgcaacctgccctccctgggcaatgcacggtgggtggtcggtctggtcgaaagtgagagcgacctccgaccaccgcgcccgacgcatcgcctcatgagtaggggccatggccagaagctctcgcttcatagccttgaagctccggcgagagacgtgagcacacgctcctccatcaacggtggcaatggtggccccaggttcttggaaacctaggtcatcatcaccatcgtcgatgtcaacagcgggggccttctgcttggcctcacttcgccgtttgccggaaggaaccgccggggacttgccctcacggcgttcctgcctcctgtcctcctcccacttcctcgttcgctcagccaaatttttgactgcgcgacagtccacgagatcgtggagggaggtgttgtgaacggagcaccacctgccggcggggcgctccctgccgggagtaccagcctctttctttttgtcgctcgcaggcctcccctttcgggtggcccgcggagcgccctcgacggcgaggacatgaccctcgtcgccggaacgatccgacctcttcttcctcctcctgtcacgccgccctgtctgagcggcggatccgggggcggccgaagctgccactccggaaccggaggagttccatgtccacgcttcctccttacgagccactcggtccgcgagctgaaaaagctccgcggtagtctggggctctttggaggcaatcttttcgagcatgcggttgtgccgcacgccccccctgaacgcgtagatcaccgcgtgtgcagggatgcatggtatggtattgcggacttggcaaaaccgctgaatgtacgagcgaagcgactcatcatcgcctcgctgtactgcatgcaagtccgcttcttcgcctgggcgcggatatgtgccttggaagttcatggtgaactgctggcacaaatcttcccaggagtggaccgacgcgggtggcaggttcattagccaaccccgcgcctgtccttttagggccatgggaaagaagttcgccatgaccctgtcgtcacccccagcggcctcgatcccggtcgtatagacctggagaaactcagtggggttgacactcccatcgtacttctcggtgatggtgggccggaaccttgggggccaacggacattccgaagactcgccacaaaggctctacagccgacaccaccagccgggggcacggagggctggtcctcacgtacatgtcgaggtgacactctggacgaagaggcgccctccgttgcacggggagtacgccggctattacgccggcgctcgatgtcgttgcgggcatccggctccccatgctggtcctcccgagtcgaaggtgtcgacgagggagtggcagccgagtgccgtgcagccgccgccgctcgccgcgccctccgcctcgacgacacggagccggtggtagcggcgccggaggtcttggtggtagcggaccgtccaccagcacccaggcgctgctgtgccgtcatgaccaagttggccgcgtcctccagccatcgttgggctggagactccgggtcatggacgacaggcgggtgtcgtaggagcgcgccagcagcctgaagcgcaccctgaggcgtgctgccatcgccgtagacgaggaggcgacgctccccatcttgccgtcctcctgcaccacctgcgactggtgacgccagggccttgtcgaccttctcaagcgcctccccctgcttagggctttggcgcggaggaggtgggggagtacgagctcgacggcgtggattcggctccccgtcgtcgccgctcacactcggagagaggtcgtgcgcctttgcttgctcggccattaggctgaacaagggaaacttggcgcccacggaagagtctgagagctcagaaaacacacgccgagccccctacctggcgcgccagatgacggagctcgtggctcctcaccgggagaccgcgcaggcccccctttgccagttcggccgagggcttagggtgagatcccaagctctctctctctctctgtatgtggaaagatcgtctgttcgcaagagaactcgagacacggcgatgtatacaggttcgggctgccgcgaagcgtaataccctactcctgtgtttttgtggatttgtgtatggatgagctacaaagtgtgagccgacttctcccccgctctaggctctaaatctggcaagaatcaacccccccttctctatgggcaaggtcctccttttatacttcaaggggataccacatgcacccttccctttccaaactggactgttctttttctcttgaacgggcggagatcagcacggttgctgtccgaatgacgctccgatgggacagcccacacctacctccacttccgccgggggcaggtgcgtcgtgggaacgtggttgcgagctgacgacatgagcagtgtcaaaccggtcacaaatcggtcattcttgtccgccgcgtgtcagcttagcagtgtgcatgtttgcccttcttcgtgtaacaccttgcctgtaatggttaggatgaagcctggcataaatctaaccagggctaacgtgccatctctaagagataacacgctagctccggcttgagacgagttgcctagaggctttcgtcttgacgggatggggcaaggcgtgtgtcagaccgccagtcgccacctaacccttgatctgaccggtctgtgactggtcacagaccggataaaagagcgtgctgcactgcgttgcacgcagcgtaacacgcttgaccagactgcaataaatgctgttaggtgagcacagctgtgctcacttatcccatatatatggcgcagacttctttaaggggtcggggtgcctcggccctcggggccggggcaagcgcaacccgaccccccctcgggggaaatcacgaggagggcggacacctcaccctcgggcccaatcgtccccgaaggtgccaggccacgtgggcgattgcgtctgcctcaagcctctggtcatgatactcccggtcccatatcaccgacaatcgcagttatcacatgcggtaactttttcagtttttgaaaccatggtatatctcgcgttaaccatgtggtttttatgataactgtgttgttaccgtggtaaccaccaaaccgtgagatggtggtaaccaccaaaccgcggtttggtaaaccctggatatcactgatcatatctacactacttatttgaaagatgggacgaccaatctcgtcatgcttcttgcaatgagtgctttatactactcttagccgcaaccaaaatttaaatttcaaaacttaattttaaaactattttttatgattttatcatagtatatataacagttttacccataaattaatttttaattactaatagttaccgcttttaatcaattataggcgaaacgatgtgactcgatatcaaaccagcagcaccactctggctatgtagcgtttgttaaagcgattagctcgttggcttactaacaaaatatttaattagtatataattaattaagtattaattattatataccaggatgaatggatttgttttaattttaaagttcttctatatacagaaagtttttaaagatttataccgtttagcagttttaaaaatatatccgtaacgtcgtaatagcctatagaaacaagaacggcccccttagcttagggtttattccatagtaaaaaaaccggaccggcagttgaaccagaaaaaactgaaaccggccaccttgatggttcggttctgcttaaagaccgtccctgcaatcaaatcggtaaaaaaggggtgaaccggccattttttcttgaaccagtgaaccggcggcggttttttttaagaatcgaaccggtttttagtttgtcgaaccggtttttaatttatcctatggcagtatgacattataaatttattatgttaccacatcacatttattttttttaatgttgtgaccatataataatagatatactggtttactcatgcatatgttcaccaattttttatggttctatattaaaaataatataaatcaaatataatatttataaataaaaaaccagcggttcgaccgatcacctggcagagccgacagtcagagcgtgtcgacccccggtccgttttttttttcctatggtttattccagtctacgacgcggagcggaggagaggacggtaggtatggccctcgcggtccatggcggcgacgccgaagacgacgccattaacaaatctgaatgcagcagaccgagcaactgttggcaaggtacatataattatgaagattattccattagcttgaccccaatttattgttcacacacattcatactgcataatgcatgtaaatgcatcatacattcatactctaagacgcgcgcacaaaaagacacagctattaatttgcctctacgcatgttaagaatgtgctcctctggcctcctgtcgatatctacgcatgttaagaatgtgtagatcattgttacacatgttaaactctgaaataaagttgagtttgtttagtgcctcagatagtggaccagggagatacttcctcagtcttaaaataagctaacctattatgggattaaaataagctgacctattataggatgttatatattctatactacgaatctaaatagacacatatcatattacgttagtttattttgagatagaggggacaacacataatattaggttagtttattttgagatagaggggatagagggtgtacctcctcgtgcaatatttacctcttcactttagaattaaaaactatccttccctactttatcgaaaaccgtaaaattgatgactttcaatcaacacagtataaacatcaactaaaatcaattgattttcataaaacgatcactgacggtttcttaaaaaccaagcggtattttctcacattcatgtttagcttaatagtcactggtagagaaaccatctttggtcggtcgacccaaatccaaaatagttctagttccattaaaaatcgggactaaatatgatttttagtcccagttaataagaggaagatctttagtcccggttgtaaatcatctttagtcccgtttggtaactccaacccggactaaagttcatttttagtcccagttgattccatgtcaggccgtgtcagggccctagaatctttagtcccggttagtaacaccaaccgggactaaaaacctatttttagtcccggttggtgttactaacagggaataaaaatcaaaacacactatataatccatagtaccgatcctcttttcccgtccacataacaaactcctccctctgtctctttttttcctctctaacttcttatctcttttcttatctctaactccccctcctcttcttccttttttccttcaccccatagtgaagaagcgtgcaggaagccggcgcggcggcggcggtaggcggccggcgtggaggcggcctgcgcggcggcgcgggggccgcgcggcggcgcggaggggaggaggggaggcggcagtggccgccggccggattttttttctttttttttttgagatgtgaatctgtgatgtatttttgtgtgagatatgaatctgtgatgaatttttagaaccctgtgatgtaatttttttaagagtttgtgatgtatttggagatgatctattttttaagagtttgtgatgtatttggagatgatttatttgaggatttgaggatttggagatgttctgtgatatgtgatgatttggatatgggaggggacgatgtgaaatcaatattcaatattaaaaacagaaaaaaaaagaaaaaatatctttagtcccggccatctttagccccggttggtaaagatcgatttttagtcccggttatttgaaccgggactaaagatagcgatctttagtcccggattcgtagtcccggttgggggttacgaaccgggactaaaaagcacttctccaccagtgagtggtatcttctcgtcatgtgtgatgatattatttcacttatcaaagatgacatactatattatatattcatgatagattctaattcatttcaaagaacaaaaatgtcccgcattatctcacattcatgtttagcttaatagtggtatcttctcgtcatgtctgatgatattatttcacttatcaaagatgacatactatattcatgatagattctaattcatttcaaagaacaaaaatgtcccgcattatccaccgtttttttagtaaattgtattttgcaccaggtaaaatgcatcacgtttcgttttgcaccagatttattacatactttcacttaacatcaaattgtattgaaataagtttcactatatcatcaaatctattaaaatttcatgaaaactcataagttatgaagggaactttgtgaaacatggtaaaatttgaagaggtttcaaaaattttacttatattttacaggatttcttttaattatatgatgaaacctaatgcaaagtgaaatttattttgatatacaatgatgtagagtgaaagtctatgctaagccgaatgcaaactgaaaaatgaagtatattctaccctatgtaaaaagaggtaagaatgcaatagcccttttaaaattttaatcgcctaggcttcgtagagtgagccatggcagcagtaggtgatgatgggctggatatcctcacatgaaataagtccagtggtcatccctcaactttacatcgagcttgtttgatatcccttgtccctaataccagaaatcttcacccctaaacaggtgtggagacagcgtggggccgtgggggcggggggtctttagaccccctaccccctaatagaccattagagcccccataataccccctaaaattctaattcatatatttatagatgagggactaatatagactttgtttgaggttgttagaaggctcaaaaggctaagaaggcccaaaaaatcctaacccaaccctaaatctctcttagttgctcttggttattttagtttaaccctcgctatagttttatcctagctccgccactgcccctaaactgtataaatcagtgcaactttggtgccataacagtttcagcggctggtttagctcacgtggcattctagtcaagaaaaaaataatactacctccatattttaatgtatgacgccgttaactttttgtccaacgtttgaccgttcgtcttattcaaaaaatttatgtaattatcatttattttattatgacttgattcatcatcaaatgttctttaagcatgacataaacattttcatattttcaaaaaaatttgaataaaacgaatggtcaaacgttactcaaaaagtcaacggcgtcatacactacaatacggagggagtaaaaaaaatagtggggcccacatgtacggtccgatgcggagcacacgcggcatgggtaggccgtagtctgtagaggcttagggagcgattcctccgccgccgctgcggctctcgcttccgggtggtttctcttcgccggagccaccgcattgacccatgccgccgttctgctagggaggaagctgcggccttccgttgatgctgctcctccccgccggccaaaggagcttcgatccgaggtgctacactgaggtctacggcacgggactacccctcgcgctcgccttcgtcggcggcgacggctagctctactccttcgtcctctgctccggctggcacccaataacagcctccctcatccggctctagcttagcacctcctccgccctgctcctagtcctcgccggcctagccgcacgagctataaattccatgtcgaaagagtagagaaggggcagccaccggcaggagaaggaagtcgggccctggccatgtccgcccaagcccatgccgtgatggagtctctgaggactggcgcggtggccaacggcatggagatggaggtcgagctccaacgtggcggcactgcatcatcgagctcccttgtcctcctgctctgtacagggccggccctggccctatgcagccgaggcgaccgccgggggcccatgatggtggaggggccaacacctaatactagtagtctagtacctcatccgatgttgagatcaatgatctttattcagaattaaaggtgtgattcttcgatattcgcgcctgagattctgaagttcgttatggatgcagattgctatccaaatgttttagttgcctatcgaaatctcttaactgtacctatgactgtagcttcagctgaaagaagtttctcaaacttgaagttttgaagaactatttgagatcaactatgtcacaagaaaggttaaatggcttggctatgtgctcaattgagaaggatatcttgaacactattgatcttaataccgttattgatgattttgcatcaagaaatacccgaagaaatatcttttcatgggagcaacggatatgatggggttttgttattcattaagttaatgaataatgatattagttccaagttataaatatattgttatttttatttcttcataattaccagacatgttaaatttaatatatggatgtatttgttatcgttttgcaagtaaaattattatctatatatcataaaattttatatatagtttagagggcccatcacgatgagttcgcttagggccctcaaaatcataggaccggccctggctctgtagcagcctcgtaagctcccactgcggcctgcctcgtcgaggtcccccgtcctcaagtcgcttctagcgtcgacgagctgaggagctcccccactggaagtagggatgatggcggcggtgacctttggcaaggcgacgacgacttggaggggagggctcaattcggtcgctgctgccattccgattcacgattcacggccttcacggcttcacctccctctctcccctccctgattcagccaccaccggcgcggaaggagatgagagaagaccggaagaagagataaataataagggacagtagagtaagaaagtgtgtgtcacttatatgtgggtcccatatatattttttattttcgctgactcggatgccatgtcagataaacaaccctccatactgctgctagggacatggttttaaatatttgaggggtcgatatttctggtattggtattaggaattaggatgtcattcttacatactcgacgtaaagttcagggactagcagtggacttattcctcctcacatttatacccgtgtgctcccggcccaaacagctggacacgaagcccgtatgggcccaaaaaagcccaagtcatcagttcttccaccgtcagcccggcccatgtcgaaggccaggccgatctgaaccatcgccatcctcgccgtccggccaccgcccaccggcaaacggcggcctcgctcccgctccggcgggctgcgggggcagaggcaggccgcgggagaccgagaggcctaccgtccggtgactcctagctcgaggccacccgcgggctatgctcctgattcctgaggtaaatcaaagctagtggagtaccatggcttggttgattctccagtgttgtttagagatcggggaaggtggcttcaaatgcttggttgagatttatggcgtttctcgatgcggtattgcagtgtcgtttggttgcggattagcggcccgcgcgtggtggattggagatacagcactcgaaatatagtcacaacttgatactgcaggtacatttgtattcatgcataatcgtgacatgattcggttactatcagatttcagtttattttagttccttccagttttctacttattgaagcagattgtattaactcaatttcactactacatcacaaagctggacaatcaagtaagttttgcctggcctggggtgtcaatatgtcatcttgctggggctggagccactgaattagccttgctgaagtgagaaccacttgagatcactagccactgcttatcttctaaccagcatggcacattatttatcgacttgatcataactggtttagccaaaatatctgggcatggttatctgatcatatagcacacctactccaaagaacacaccaaatgcaattgcaaacactaccttgtcaatatactgctttgcggagataggggttgttggagctgctaccgctgaattgcaatggtgttcaagcatagggctgcatagctttgggttcccagcaaaactagaacttaggaatgtgctgaactggcctccaattggtacaggcccttcaaggtcattgtaggaaacattgaattcagaaaggaaatgaaggttcaccagccctgatgggattggacctgtcagatggttggaagacaggtctagcaccatcagattcttgaggttgctgatcgcttgtgggatctccccgtttaagttgttgaagctcaagttgagtgaaagcagttctttcaactgaccaatctccatggggatcacaccacttaatttgttgttacctagattcaacatttttgggaatgcactagtcgcacggtactgaaaacacaaacatgcgcccacataaactgtaaaaggggagactattaggtcagggtgatcttcaatcttgtccgattttagcattggcatctgcatcaatgctgttggtatttctccagtgaggctattattcgatatgtcaacatacttaaggaagttaaggctactgatccaggttggtattggtccactgagttgattgttatataatgctaaaagttgcaaacttctgagctttgatagccaattaggtatttttccagtcagtgcacaatcatttatgccgagaccctgaatattcttaaaaccatcaattgtttcatcctctggcatagcttcatgcatgaagttgccaccgagtagcaagacagtgagattccttaagttcttcaatatgtggagtgtatttgtaatatttttaaaattgttgtaggaaagagatatgaaggtgatggacttcaaattttctattttctttgtcaactctccatgaagcttgtttgtggatagccgcaaccaagtcaaattactgcatgagtagatgctttctggaattgtgccaatgaagtaatttgaagataaatctaaaattttcagattgggcaaggtggagaagttaaccttggcaagctctcccttcaacttatttttcttgaggttgatagtaactagatttgtgcaatcacccaaggttggtggcagctctccagatatgttgttttcttccatgtgaagttcttctagtctcttcagttgacctatagaatctgggattttgccactgaatctgttcccaccgagatcaagaaaacctagattactgagctttatcattagtgcatcgtcaattattccttgcaagtggttattaggaaaggagaggtactccaatgaggtggctctgaagagatcatctggcagggtcccaatgatgttgttttggccaaccctgagcattctaagggaggagcatttacctattccaggggggatgctgccactgaattggttgtaagaaaggtcaagcacagcaaaggatggtgagctgatgcagaaagaggaaggtatgtgcccactaaaactgttgttgctcgcattgattgctaccaggttgctcattttctcccatgttgtggagggaaatgctcccgtaaacaggttgcttgagatattcagtacctggagaggccggtcaggtgatgacgaattcagctcctgcaattctccatccaggcggttgaagctgacatcaaggacgacaatgctgctgaatatcagctctgatggaagctcactggagagtaagttgtatgacaggttgagtcgcgacaagctggtgagctcgctcagggatgatgagatgcacccttgtaggcctcttgaggccagtaatagctcagttactgcaccatcttctccacagatgatcccttcccaggtgcaacaatctgtactattctgccatgacgcagcgaggccaccatcctgcgatagcctggtgaggaactggaggagggagcgcctctccctctcggtgcatgaaccgacaggtgagatgaaggtgaacagcagcaacacaagaacagggccaaagaaatttatgcaaaacctgctggttttgttgctgcacgaaaaatgtggtattggcttcatggtttgtatcagttggaagctgtgacagaatagcgagcttgattcaccaagataggctggtattgtgggcaaaaccatagttcatgagcgatatattgtcgaagcatcgaagatttacaagttggagtgttgacctatgggtttactcgctgctacctcactggcttgctgctatgcttaggtttggaaattctgtccaactatggccgttttcttttaccagtcttatgttttgtctcatgatgcttcacaggagggcttccacttaaattggatctttccttgtacaaatggccacttgactgctatttgttaaattctccattcgtttactccttagtcgtaaagcagagtcatagtccaggtctatgtcatctactgatctactttttatcccttttgttttcatggagggaggtatagcgtacattgtgcttctaatcttgatacttccagcagctgtattttgactccgtcatcagcaaccgatttgcgactgatgactgttcttggcttgtgataatatacaacaaatctgttgtaaaagattacttctcttatcttgaaatagtttggctacactactactaataatgtaatggatgcaggtatgttacatgttcccgtgctgctggattggaatgcgtttgcgttttcctgtttgaacaaaatgtgatcaagccttcaagtaaaggctgttttaatctttgatgcactcggtgtgtgatgtaaagcttgtgctgctacagttctacctacttagtagtattttgttttaattttcagtttatatcccttcgtagttcgttgttgttttctaaagaaacttcggcgaagtgtgcgtgaaatttctgtcacagacaagttcttgcagtcggcattcgcgtgttccagattttatacagtataaagtctaatactactccctccgtttcacaatgtaagtcattttagcatttcccacattcatattgatgttaatgaatctagacatatgaatgtgggaaatgctagtatgacttacattgtgaaacggagaaagtattatattatcttcgatcgcgttggctcttgtaaggcctggttttgttcccaaattttttcttttaaaaatgtcacatcgaatctttggacacatgcatgaagtattaaatatagattaaaaataaaaactaattgcaccgtttgcatgaaaattatgagacgaatcttttgagcctaattagtcaatgattagctataagtgctacagtaccccacatgtactaatgacggcttaattagattcaaaagattcgtctcgcggtttccaggcgagttatgaaattagtttttttattcgtgtccgaaaaccctttccgacatctagttaaacatccgatgtgatatctaaaaattttcttttcccaaactaaacacaccctaacaaacttgtattttatatttcttggggcccttatttcaagactgctactccctcccagcgtttttttatggccaggaattttttactatgcagcccttgtactagcatgtcactctggccgtgtttagattcaatttttttcttcaaactttcaacttttctgtcacatcaaatatttggacacatatatggagcattaaatgtagaagaaaaaaaaacaattgcacagtttgcctgtaaattgcgagacgaatcttttgagcctaattacgccatgatttgacaatgtggtactacagtaaacatttgttaatgacagattaattaggcttaatagattcgtctcgcaatttacagacggaatatgtaatttgttttgttattagtctacgtttaatacttcaaatgtgtgtccgtatacgtaaaaaaaaatttggacacgaactttttttttgagggaatgccatttgtcaagctttattgatcattaaacattgttacatcgtttgccaaggtgcttagaatataatcaggaggttcatcgtttgccaaagtgcttataatataaaatttggacacgaactaaacacagcaactgtctcctgcccttgttttcaaggaaatatttgacggtggttattgttgaaaaagtcgagacgacgtgtacgagaaaaccgcatgaggcatgctggccgatatacgtagcatatcaagttcttgacattttttagcgagatcgttctagatctcctttgaaatggaagaacttcactgatttttacgttcaaaatgtcctggcctgtttggcaagagaatgaaagaggaatgggagttttaaggaggaagttgatggtgggattggtcatgggagttacatttttagtctccattccttatttggtttcacatcgaattccctccaaatctcacgaattaacgggcctcccctaggtaagagattgatgggaattcgaccttttaattccccatcccaaaccccctcgaattcccaagtctttcaaccaaactacagacttaaactccccatcccaaaccccctcgaattcccaagtcttccaaccaaattacagacttaaactcccagatatcataaactcccattccccatcaccaactccctccaaccaaacaggccgtccatgaaattcctccgttccaaagtactcggctactcgctctatctaaaaatctaaaacataccatttccatattgtaatgtatgacgctgttgactttttattcaacgtttgaccattcgtctcattcaaaaaacttatacaattatcatttattttattgtgactcgattcatcatcaaatgttctttaagaatgatataaatactttcatatttgcacgaaaattttgaataaaacgaatggtcaaacgttggtcgaaaagtcaacggcgtcatacattaaaatacggagggagggagtatttattctatcatcgatattaagaagtaattaactcgttcaagaagagcgtccgcggccggagggcaggaacagcgatgcgaggcagccggcggagcggcggcgggccacgaagttgccgtgtgtccaggtggtggagttgcacggcgcgctgcacagcgtcacgtcgcccgggtgaagggcgttgtagtgatccaggcactcccgcgcgagccgctcgttggactcctcctccctgagggcggcggcgcggcgccgtctggagtagtagtcctcctccagcgtgatcggcggcggccatagcgcctgcgccgcctcctcgtcgccgaccatggctgcgtccaggatttgcgtcgcgatcgatcggagaatccgggagcctttcaggccctgtttagatgggagtccctatcacatcggatgtttgaaaattaattataaatattaaacgtagactattaataaaacccatccataatcttggactaatttgcgagacgaatctaatgagcctaattaatccatgattagcctatgtgatgctacagtaaacattatctaattatagattaattaggcttaaaaaatttgtctcgtgaattagcttttatttatgtaattagttttgtaagtagtctatatttaatactctaaattagtgtctaaaaatagggactaaagttaagtccctagatctaaacaccaccaatctcgggaagaaaacgtcaaatactccatcagagaagaaatcacccgatagagcaaaatctctcgggagatcgccgtttgattcgattcatactcgttgccgtgggccctgaaataggttggcaacgttgcatgatgggcctcggcatgcttagcttcttttggtcctgagaggccttgtggccctatatcatgggcccaaattgctatccttttactgggtgtgtgggctaaaaagtggagccacgcagacacgtcagcaggagtagacaaaatcaatgtgctatgtaggacgaaatcgtcgtccaaaccactaaggctgtgttcgttgacaggtgataagggagattgtgaatcgttttccacgcgcacacttttcaaactactaaacggtgtgttttttgtaaaaattttctatagaaaagttgttttaaaaaatcatattaatcaatttttgaagtttaaaatagttaatactcaattaatcatgcactaatggctcatctcgttttgagtatcttcccaatcttctcaatctctctacatgcactacaatccctttctcgactatatttcagttgtcacaaattacagacagagatcccaactcataaacgtacatgtgctagatttatgtggcaaccatctaaaaaaacaatatttgaagggagagacatccctctaaatttttaaaatttttaaagaagacattgtgaacgtgttcgagattgaacacgggatctcagaattgaaatcacacactccttaccattacagtatcaaatgcatgatgcatctcaatctatctagcaaccatctcataggtccaataccggcctgaggcactgaacaaggagctccacttcctctcaaactttaacatttccaacaatgatctacaaggttcagatgagcacattatcaaggtcaagtttgagttttgatgggaacccaaagctatgtggccctgtgttgggtaatgattgtgatgattcagtagaggcagcttcctcgcagccatctctgaaaaagaatccagcatcaaaaagtcattgcagcgattgcctttggcgtgttctttggaataggggtgctgtatgaccagctactcttgtccatctattttggctaacaatggcaacatcttcataattctgtccagactgtccttgccaatcgttaatgccctgagttgctcgatttgcattcaaacttggggcatgtttagttcacttcaaaattagaaatttgattgaaattagaacgatgtaacggaaaaattgaaagtttgtgtgtgtaggaaagttttgatatgatggaaaagttagaagtttgaagaaaaggtttggaactaaactcggccttgttaatggcgtcatcgtcaccatggaccgtgagggccgcacgtacggaccgtcctccactgccattaacaaggctgggaccatcatttctataaggaagtcagtctgcaagttcatatgtgacatcctggttcaattaaaatgtgaacgaactcgaggaagttttttcggaccggctacagggacatcttcgacatcgtggtcgccttggtctgctggtccatatggaaagaacgcaatgcgaggatcttcgagcataggatgcgcacacctgaacatcttgtggatgatgtcgaggaagaaaccctagtgtggaagacagcaggggttattaaaccatgtaataacgagaatcactgattagagttcgcctccgggcctgagggcctagccaacatccaattcgacagtttactgtcattgtaagctatctgtattgtttcattacctttctttcttaatgaaattggtcgaccgaatctttcggccgacccggcaaaaaaattaaaatgtgacatatgtagcaaatgagtaaaatgtgacatgtgtggcaaatgagtactgcgtacacttgattagtactatctcgctagttgagcaaatgtacttataagaccttatcccttcaaccataccatttttggttgattaccattttacacgaagtgaaaggataaaaatgtaaataagatgttatgtgtgaggatcctttatcataatgtcgctaccattagaatcactggtatgtgggttacatcctcctattgcctcacacgttagtgtatgtaatgatagtattattgtggacctaaagcgcaggttgttacaccatggctagcagcctagcagaaattgaactggtgatttggtgaaggagcaaaatgacactagtctaacaatagcttattttgacagcccatatatttatccctctattcttgaaaataattcgtatatgtgtgtatttttcgtttcgtctgatctctttttcattgcaaatcactcagtgcaagaagtaggacgtgatcattagtcccatctgttgttttcagataagtagatatggtcagtgatcctgataagcacttatataattactgaggtaatctggaatcgatgaacgaaagaaatcatgcatgcgttccctgttcgcaacataaaacagttcacacaaactttactgaaatttccatatataactacaaagaactagaaagaacaactgacaccaggaagaatgcagaaaagtctacaatattatcaagaaaagaacatatttgccttggaccacataggacagtcaccttcctgccatgccaattttaggatcacatgctctaattgccaaagtgaaattgaagtactaaacataaaatgaaaacaacgtgatagataacagtttggcaaatgggtacttcagttgtcctatttagtcattcaaccacgaaattcatacctcgggacttcgaacgcggtctgttcaaacatgcagggttcgaaacatgcattcagttgtgtatatatatcctcaccgaacagtgtaacttttcgcgaacaaatattagttgccaaattctaagtccaaacactgctgtgatgggagagatcatgaaggaggcaccacattctctgtggagaagcaggctagggatgcctttctcaggtctcgctgctgctgccttattgttgctgctgctctccatggccaactccaccattgcatgccttgagcaggagaagagctctctcctccggttccttgctgggctatcgcatgacaatggcatcgccatgtcgtggcggaatggcatcgactgctgcgcgtgggaaggcatcacctgcagtgaagacggggctataattgaagtctatttggtttctaaaggcctagaagggcagatctcaccatcccttggagagctcagaagcttgctgtacctcaacctgtcctacaacttgctctccggtggccttcctgaggagctgatgtcctctggcagcatcatcgtccttgatgtcagcttcaaccgcctcgacggggacctgcaagagctgaattcatcagtatctgaccggccactgcaggttctgaatatctcaagcaacaggtttacaggagaatttccatccaccacatgggagaaaatgaggagcctggttgcaatcaacgccagcaacaacagttttactgggcagatagcttcctctttctgtaccggcttgccatccttcgccatgcttgatgttagctacaaccagttcagtggcagcatcccccctggaatagggaaatgcactgcccttaaagtgctcaaggctggtcacaacaacatcagtggagccctcccagatgatctcttccatgccacatcactagagtgcctctcttttcctaacaatgatttgcaaggaacaattgatggtgtactcatgataaagctcagcaatctggtttttcttgatcttgcgtggaacagattcagtggcacaataccagattctataggcaagctgaagagactacaggagtttcacatgaacaacaacaacatatctggggagctgccatcatccttgggtgattgcacaaatgtaatcaccatcaaccttgaaaataacaagttggcaggagagctttctaaggttaacttctccaacctacacaatctgcaagctttgggcctttcctcgaattacttcaccggcacgattccagatagcatctactcatgcggtactttaacttggttgaggttatctcgcaataagcttcaaggtcagttgacggagaaattagaaaatttgaaatcccttaccttcgtatctctttcctacaacaattttacaaatatcacaggttcacttcacatactcaagagcttaagaaacctcactaccttgctaattgggagtaatttcatacatgaagctatgccagaggacgaaacaattgatggttttgagaatcttcatgttcttgccataaataactgcgcactgactggaaaaatacctaattggctctcaaagctaaaaaagttggaacttctacttttacacaacaatcaactcagtggaccaataccaacctggatcaatagcctaaacttccttaagtatatagacttatccaataatagccttataggggacataccaacagcactgatggagatgccgatgctaaaatccgacaagattgaagatcacccagatggcccaagagtctccccgttcacaatttatgtgggtgtatctttgtgttttcagtaccgtgcagctagtgcattccccaaaatgttgaatctaggtaataacaaattaagtggtctgatccctgtggagattggtcagttgaaagcactgctttcactcaacttgagcttcaacaatttacatggggagatcccccaatcgatcagtgacatcaagaatctgatggggctagacctgtcttccaaccatctgacaggtgcaatcccatcggcactggtgaaccttcacttcctttctgaattcaacgtttcctacaatgaccttcaagggcctgtaccaattggaggccagttcagcacatttccaagttctagttttgctggtaacccaaagctatgcagcccaatgcttgtacagcattgcaatttggcagaagcagctccaacctcccctacctccacaaagcagtatattgacaaggttgtctttgcaattggatttggtgtgttctttggaataggtgtgctatatgatcagacaatcatatccagatattttggctaaagcagttccaatagagacagtcaatagtgtgttctagcttcttctttttaaagataatggaagcttttattgaactcagcaaattatatcgaggagatacgagagcacactctcgctctctacatgtgttctggcttagtggcctgtaatgcaattttgtagtttactcgagtgattttcacatttcacttagcaaggccaaactctttgatgttctagtgaacttcagttggtacagtctgctccaacaagtagaaagaagtaaactgaaatctgtcagtagatgagagtcaagtgaaactgtgaaagttttacgtgaatgtaaatgctcctccattaatttgcgactacatttagaaatacttctctgaaatttggcaagagaggggatcacaagtctgaaactaacgaacactgcaataccgtgatcgacgcgaatacgcgatagatctggccgaggcgccgagctattcgctgggcggttgtggaggatcccttcctggacgcggctcaaatcaggtgggggagaagaagacaaggctaacctcgagtcctccgcttctgatcgagaagagcatctccgctacgccttcgtctcgcttcggctgccggcggcagtgcacggcgacgaccgggaacggccgtgggacgacccatattatctgggccgttacggtattatgacttgaggaatatactacctccatcccaaaatgtttgacaccgttgatttttttaaaaatgtttgactgttcgtcttattcaaaaaatttagtaattgttaattctttttctatcatttgatttattgttaaatatacttttatgtatacatatagttttacacatatcacaaaagttttttttgaataaaacgaacggtcaaacatatttaaaaaaatcaacggtgtcaaacatttagggaaggagggagtagtgaatagtccctcaaatataggttcaacctttttttcggggaatgccattcggctagctttattgataggataaaattgttacatcgtttaccagatgattcagaacacagccaggggagggggttcatcgacccaagtacaagaattttttgtcctaaacgctaacctggccagttcatgagccatctgattggaatttctattacagtgctcaatagaaattgtaccaaaaccatcccacatcagcttgcaatcatcaaacacagacatagccgctgtagcagaaaatcctccatccatcatcgttgaaaccacctgcatacaatcagtttgtactataacatttttagcaccaatgtgttgcgccagggccagcccatctctcagcgcaaaagcctccgccatcgtcggtgcatcaaggacatatggaagaaatgcttgagaagccgtaacacaagctcccaagtgatctctcaacaccaccccagtacctccacttcccgaatcaatatcgaaagcagcatcaacattgatcattagcattccttcaggaggtttcttccaaccgttctgaatttttgttttacctttcttatttgacaacatatagtttgttgttaaggtagcaatgtcttgttttacctttcttatttgacaacatatagtttgttgttaaggtagcaatagacattgccgaccgagcagggtgctgtattcattcaccatgcaccaactgtcttctctcctaccaaatataacaagctccctttaagatcaattctgccattctaatagcattcagatgcgaaacctttccaccctttcttatcacctcctccaccagaacagatcctgaccggtcgaaacccagaatcggttgtattctgctccatatgcctagctgcttccaaatcaacttcaactcaactttgctcttttacaagtaaaaaccatatgcttgatatcttcaactcaactttgctcttttacaagtaaaaaccatatgcttgatatcttcaactcctgaagaacaaaccggacaaccaccttggactgcaaccttaatgatattgtgagcggttttcactttgagcaactactagctccaaatcatatatagccaattcatgcaatagttacaatatctataaatatatactccctctgtcccatgatataagagattttgggtggatgaaacacatcctagtataatgcggtctgtccttggtcggttggccgacccggcaaaaatatttattatactaagatgtgtcacatccacctaaaatcccttatattatgggacggagggagtactacactattaatatctagtctcacctatcatacatatattatgttttggaatccgtgttgtaactggctataaatctatagcccactactcatctctcttttcttttatctcatcgctatggttagctcacagtatgctattgtacctgctctaatataagtatgtaacttgttgattagttcaaccgaccgagtacacatacgagggccacaaatcagtgtctcctctctttgatttttctttcttttctccctcccctcttttcgatgtggcggagcggatagcggagcaagccgacctctgcccctcttctccgctgtcggctcctcttcttcccgagcgaagaggaagggcaaggagccgagatgccgacggctgtgagatgcagttgtgaggaggggcacagaggaagggctggcggcgagcacgatgctgccgcttgcatttctctcctctccgtatggcttggacgggcgaaagacgactaggcaatgtgacgcctgctcgccgctcttcttcctcttctcttttttttttatcttaaacgtgctctttattagctcgttggtttagtacggtcacgagataccagcacatttacaaactctggaggaggtcagcccaaacagacatctgacccggatcccaactcatacttagacgagcaatgtcatgagcacaactattacaggagcgacccacaaaagacagtttagaattcctcttctctgccttctcctccagcacgtcgccgcgcaatcaccggccttgtcgagcttggctgccatatgggttagttggaccgttacgggatttcattttcttgcggcccagtaacggaatttggacttacgtgcggcccattttggttgggcctaggctcgtcgattgatcagccgccatggcccccctcctccacggcgaattttttttatttataattttttttattaaaagttttacaaaaataattttccattttgaaaattaacggaaatagtcgcctaccgccctctgggagggcgatttttaaaaatcgccctcccagagggcggcgaaaatgacgtggcagacggccgttcgctctcgggcgacggccgtcaacaaaatttgcaggcggcccccttgccgccctccgcgagggcgattttctactgtgcggggggccgcctgcaaatgggcggcgagggggggcatggaattttgcaggcggcccccttgccgccctccgctagggcgattttgcactgtgcggggggccgcctgcaaatgggcggcgagggggcatggaattttgcaggcggcccccttgccgccctgggggagggcgattttgtactgtgctctatattttttttatataaatatcaatagttatcaaatctttttatattgaaaactatacaagattaaaatctccaagactggtaaaatacaattttattattttttagggcatatttggaatgttaccgtacaaatattttgttaatgccaaaatataagcaagttttggcactaccaaatatttggtaaggtaaaattgcatttgatcatatttggtttgctgccaaaatgtaaaattgtagtgaagaatgttgtacataatctcaattctagattacgtattaccaattaataggcttccattttcgtgtgtggtgtggtagtgggaaagaagatatgaagaggttgccttcagattgtcaattatatagcgtcattttcactgcaatatatgtgaactcaatgagatacattattcattagatgtgacaagacgatcacgcgtgggcgtgattcactttatgtcaacaggcagcgccgaaagttgatagtgataactcgagctgccgcttttcatgtgtgctgttgtggactgtgcgcgctactggatatggcactaccgtgaagcgccgaaagtgtgttgttgtgagcataagttgttcaagcaccatacgaatgaaaagaactacgtagacgagacaaacacaagtagtactgcagtagtaatagcaaaagtagtactgctttacaagtttgtaagccaaaagaaacggtcacataaggactgaagaggtagaacactactgacgaggcctcttacccctgtccctcctaccctgcgccctaatgtgcccctgggagtacgtgagtcggtccgggggtacggcacggccaacccgtcctgcctgtacaggtgtgacctctggctgctcctgagtgtgcgcctctggagctcctccaagctgagaggagcctagtacgtcctggtggtctgcaccgtgcaagtcgtcgtcgtagaactggctagtaggaccagtcctaccggcgtgagacgaagaggccccagtaccgaagatcccggctgcaaatcctgctggacaaggaccatcagtttcgtacaggtatttaacagtattaataaaaagtaaagtaccgtgtgggcgagggatcgacgctccgtgagaggaagagctggcgaacgcgcccgaagaggtggcgaacgcccctgcggagctcgcggaagcgccggtcgtgcctgcgaacgcgctcgaaggcatacgaggtcctgcgatgaggaaacgtgcagttaaaacatggtgacacattcgtgcaaaagctgaaacaaaaatgaactaatatctgggctgaactgtaccgtgcgaaaccggtgctgtaggtcgcactgctccgaagctaggggcgctcgaagacaaacgaggtcctgctccgacggtaggaccgcgaggccgtgggtgtaccggaccagctggaggtacgacgtccacggcgctgcgacaggagaagacgcgcatgaccgcacgcatcttctcctgcatccggtcgaaggtcgacctctgctcaacgtcagtcaagtgcaaacctctgctcaacctcacctggactgcggtgatatcggcactgatatcccgtgccgcatcagcctatgcaagatggaaataaaaaattcagtagttgtcctatattatgcaagataaatgacataattgttaccaacaacactgctgtacatctcacttgccacaaaaacgtgtgagcaaggaaggtgatgaagcttcggcttcatacaactgcaggtacatccaccatccgccttcaagacacattcctgcacggcttgcttgcgatagataccacgcctgctcctatcaacacacattatttcataccgatgcacttgtgtgccttgagcaacaactctatgtctccgtgcctttttgattttatcttccatgtactttgtcactacgttgccaaacactatgttgttatcggccatggacggaccaattttcttgtatcgatccctaaagtaggcttgcatgccgtgaaggatgaattcaacaatagcaaccaatggaagtacccgaactcctcgcattacccagttgtacacctctgccaaattggttgtcattatgccataccgagatccatcggtgtcgaacaatagagcccacttctccttaggctcattctcaatccactgagagaaatttctgatggccgaccctgacctccttctcattgttggtgggtcatcatgtaatgcaccaagaggtatgggaggctcgtcaccttcaactcgtggtctgcgagattgctcatctgtttgcttcgttgtcaactcatccaacttgtcccacaactcattaaatttcttctcttggttctgtgcacagagcctcttaaagagatccataagatgcttgttcttgaattgcttgtagaaatttgcacccatgtgacgcatgcaccaccgactccgaacatcaggccacttagctggaagtcccttctcatcccaaccgttctgcaagtagtcaatagcccgcaacatacccgcatgacgatcatgtataaggcaaacgttgggcctcatacgcaccactgcaatgtgcactctctctaggaaccagtaccagctttcagtgttctcactctctacaaatgcgaaagccataggtagaacctggttgttcccatcacacccaattgctgtcaatatctgacctcggtatttacctgtcataaaagttccatctatgcatagaacaggtcgacaatgcacaaaagcattgatgcaagcacccaatgagaaaaaggctctttgcagcacactctttgttcgatcttcaaccgatgtaaatgtatgtaggtcatagtaagtattattattcctctgggcaatggtggctaacaaacgaggcaaattatcataagaagcttcaaatgtgccatacctcatctcaatgatcttttgtttggctctccaggcctttgcatagcttatggtgtacttgaatttgttctcgatgtgcctaataattgattttggttcaaagccaatgttaccaacaacactgctgtacatctcacttgccacaaaagctgaagtgatgtttcggtgatacttctccaccccttgtaagtagcacttgtgctcggtcacaatgctaactttccaataatcattccatttacccttatatgcatggacacgccacggacattcttccttcatgcacctcacttcatacacataatttgttgacttgaccaccctaaactctctctgcaatgaaactgcccaatgcttcaccgcctccttcatctcatccttatgagcataccttgcaccctcaattacctcgttctccttatactcccagggtacatgatcaccctctgatataacaagaccagagaagtcctcatttgcccaatcagtggccattacatcaccttcctcatcggatgatgcgtcgtcctccgcttgctcattatccgaatcttccctctccatttcatcaacaattataccgactctctccccctcatccgccatgcccatggcctgctcctcccttggttgattttcctcattttgcatcgatggtccaacaacatcccctgcattgctaggaccctccacatcttcggtttgcattgaaacatttgtatctttctcttgtaccgacacaaatataacgaggggccatgaccgttcaaaagccatttccacataccgtctccaagcagcagtgctgtccatcggcattagttcccaaaaataaccttctattgcacgactcactacaacagatactgacattgtgtagacttcttggtctattctaaatcctctcaacaaccaactataaattgactcaaatgttctctccgcaggcctatcgatgcccttagatgtcattacaaaatctgacagatcaacaccatctggaccaaatctaatatttccttcaccgtgaactatctgaaatgtgaccttacttgacattgtgcctgatgaaaacaataactgcgttaacctcgcatttctgtactacgccctaagttacattctctacaatattgttctctaaatttctaaaagtaggttacattctccagatcaaactaaactacatcttacaattaacactactgtctatgtctcaattcatactattatattctatgctctggatctacacatatgtgctgtgtgctacagatctgctaaaatatatggaactaaaactaaaacgcaacatatgtactcaaacgtaatatattagtacaaatgcaaaagatgtatgggagcatacctgtgatgaagtgagcgaaccagcagggcttcgccgctccccttctgctgccctcccctctctctctctttcgtttttttggatttttagtgaatataatgaaatttcacaggggaggggctgggctttataggggggaggcaaaaatcgccctcccccagggcggcaagggggccgcctgcaaaattccatgccccctcgccgcccatttgcaggcggccccccgcacagtacaaaatcgccctagcggagggcggcaagggggccgcctgcaaaattccatgccccccctcgccgcccatttgcaggcggccccccgcacagtagaaaatcgccctcgcggagggcggcaagggggccgcctgcaaatttcgttgacggccgtcgcccgagagcgaacggccgtctgccacgtcattttcgccgccctctgggagggcgatttttaaaaatcgccctcccagagggcggtaggcgactatttccgtcaattttcaaaatggaaaattatttttgtaaaacttttaataaaaaaaattataaataaaaaaaattcctccacggcgacccgctcgccgccgccgcgccgtcccccatcgtcgccgccgtctccgcggggcggcgaccgcagcgatgtttcccacgagcagcgaaacccacgaggttagcccttgatctgagcccccgcggctaggaagaaatcccgcatcacgtagtataatactatttacgcattcgatttactaacagatttcagtttacttccaatccacttcagtttcttcccaattttctactttttggagcatacactgcattaactgaatctcgttggcagatcacgagctggccaatcaggttttcctttggggtgttcatcttgctgggggctggagactgtggagccactgagtaggccttgctgtagtgagaatacttgaggtcactacacagttttagagatgtctatagcaaattactagcaattaagaagtcacagatgttgattgcttgctctgctctatgacccattgttcatatctgcaatccagcgcgcgttttgattgaattgataatactgtaactgatttagccacaaaaaaaaaaatctggatacagctatctaatcatacaccacacctactccaaaggacacaccaaacgcaatcgcaagctttgtaaaaatctggatacaactatctgatcatataccacacctactccaaaggacacaccaaatgcaatcacaaagacagtcttgtcgatgtactgctttgtggagataggggaggtcagagcttcttctgtggaattgcaacggcgcgcaacaatagggctacatatctttgggttccctctgaagctaaagtctggaaatgtatcaaactggcctccagttgggataggcccttctaggtcattgttagaaacattgaatgctgagaggaagtgcagattgcttagtccaggagggattgcatctgtgagatggttattggacaagtgtagaacctgcaggtttgtgaggttgcagattgattgtgggatcttcccggataagttgttgaagctgaaatcaagcacatgcacttccaactgaccaattatcggggaaatttcacctgtgaagctgttgtagctcagattcaacaatgtagggaaagcagtaagagcacggtattgaagtgatggaccattatagacaggaatctcaaaaacccttgggtccacatgggttacatatttttcagatctgagcattgtcatattcatcagattgattggaatttcttccgtaagtctgttgtctgacatatctataaagaagaggaggtttagggagttgatccaacctggtattggtccagtgagtcggttggcacttaatattaacatttccagattcttgagcctggatatccattgaggtatattcccagacaataagcagccgcttatgtcgagaacttgaagattcccaaaaccatctatgttttcatcctgtggcatgatctctcctctaaagttgcgcccaataagaagggtggtcatggtcctgcaacttttaaggacctgaagtgcatttgtgatgtttgtaaaattgttgttagcaagtgacaagaaggaaagatacttcagattgattattcccgatgataactcaccatggagatggttagcggataaccgtagtgctttcaaatttctgcatgagtagatgcttactggaattgtgccggtgaagttgtttaagtaaagatctaaagttcttagattatgtagggcggaaaaatcaaccttgccaagatctccatagaagttattgtgttttaggtctatgaccttcagatttgtgcagctgctcagtttccctggcaactctccagacatcatgttgctacatagatgtaactcctccagttgcttgagctggttgatagaatctggaatcttgccagtgagctggttccatcgaagatcaagagtagccagatttttcagtttgattaggtgtgtgccatcaattcttccctgcaatccattgttaggaaaagagaggtactccaatgagatagcatcgaagagttcatctggcagggtcccgctgatgttgttgtacccagccttgaacattttaagggcagagcaattacctatcccaggggggatgttgccactgaaccgattgtaggaaaggtcaagcacagtgaaggatggcgagctgatgcagaaagaggaaggtatgtacccagtaaaactattgttgctggcattgatgacgaccaggttcctcattttttcccatgtggtggatggaaagtctcctgtaaatcggttgcttgagatgttcagtacctgcagtggccagtcacatactgatgaattcaattcttgtacttctccgccaaggcggttgaagcagacatcaaggacaatgatgctgctagaggacatcagctccactggaagaccaccggagagtgagttgtacgacaggttgaggcgcgacaagctggtgagctctcctagggatggtgagatctgcccttcaagacctcttgaggacagcagtagctcagttactgcgccgtccatgctgcagatgatcccatcccaggtgcaacagtcggtgttgttcctccatgacatggtgaggctgctgtcctgtgaaagcccagcgaggaaatggaggagagaactctgttcatgctcggtgcatgaactgacgggagtgacgagggttagcaatagcaaaacaagagcaaggccaaacaaatgcatgcaaaaacttctgcttttgttgttgctagaagaatggagtattggtttcatggtcagtatttctgtgggaaactgttatggattatccagcttgatttgccaagaaaggctgatactgtgtgcaaaaccatagttcctgagcaatatattgtcgaaagggtggaagaattataagctgattgaatgttgacctttgcgtttacttgatgctgcctcactggcttggtgagctggtgctatgcttaggtttgtaaattcagtctattatttgctttgttttccaccgacatgatgtgttaggcacacattgtttgacagaaatgcttgcaattgaattggtccaagtatatttcttcatacgtctgccacttgagacgcactaaggcagtaagctatttgaaacgattttgttaaaatcatcattccattttactcctgaagcagtagcagtgtcatggtccaagtctattggactattactctactgatttcctttgatgacgactatgccggcctgcgattaatctcagacatcagctgcattttttataatctgtctcagacaatctatttccgactgttgactgttcttggcttgtgataatcttttataaaaagaaaagaagaagattgacctgctctggttgcatatcctgtttttcttgagatggttggattaatgaaactgtaactgatgcaggtatataacatgtttgcgtagtgctgctgaaattcgtttgcgtttgcatggtagaacaaacctcgagccttcaaatttcaagtaaagttgtgtgataatccttgattgaccctttgtgtgctgtacagccatgttgttatctacaagtactggtatcttgtttttatttcctttttctgttcatatcttctcgttgttctctgtgaaatttctttgttacattccgttcttgcattcgcatattctagattttactctcttggcttggtttaagatggctgaatttattggataatctgatttttatgatagctatttgagggtataaaagaataaattaactacataaaaaatactccaattttttttccttttggcacgaaacacacttttgaagtagctcggaaaacgtgcaaacaatgatctagaatcctaaatcacataagaacatattttgtattttaaaatacaacatatgtcgttcaaaatatatgacgctgtcgatttttgcactcctttggatcattcatcttatagcaaaatcgtataccatctacgtgcgttggaggatttcgacttacgtgcggccgaaacgggattacaacttgtatgcggcccatattttttgtgccgttatgggctttctctttcctgcggtccaagaacggggcgcaggggatctcagcttacatgaggcccactattgttgggccggaagggaagtggactcgcgtgcggctcatgttggttaggctcatgggctctccggtcatccagccgccgacgccgacgccgacgccgaagccgacgggcgcctcggcgacgttgaagacaagcctcgccatggccctcctccccgcggagccgccgccgccgccatcgacgcatgagtggccgtacgtggtcgtcccaaatcgtcgccggcggccgaagcgtgaagggctgcgcccgcagcgatgttccccaggagcagcgaaagccacggggtaagccatgccttctccctccccctcttgatttgagcccccccgcggctagtaaggaatcccccgcaaaagatcggcgaacatcgcacccagatctatgagcggtgtcattggtactcacaaattaatacaaacactgaatgtttacttgagtccaattaagttccttccgattttctactttttggatcgtactgcattaactgaatttcactaacagatcacgacctcataattcaggtttgcctgggatgttcatccagccgggggatagaaccactgagtcggctttgctgaattgagtaccattcactcactcagttggagaaggtcatatggtaattacaaagttgcagctgttgcttccagttctatacccattgcatatgagtgcatactgttgattgtccctatcgtaatcggtttaaccaaaaatatctaggtagaactatctgatcatatagcactcctactccaaagaacacacagaaagcaatcacaaagacaaccttgttaacgtactcttttgttgagttcgaggaagacaggtcttcttctgctgaattgcaatggtgcaaaagcattgggctgcatagctttgggtttccagcaaaactagaacttggaaatgtgctgaactggcctccaattggtacgggcccttcaaggtcattgtaggaaacgttgaatttagaaaggaagtgaagattcattagtgccggagggatcgcacctgtcagatggttgtatgacaggtcgagaaccatcaaattcttgaggttgttcattgattgtgggatctcgctgtttaagttgttgaagctcaagttgagtgaaacaagtgcttttaactcaccaatctccatgggaattgcaccagtgaatttgttgttacctagattcaacattttagggagagcagtagctgtatggtactgaaaacacaaacatgcacctgcataaaccggaagtggaaaggctattgggtctgagttatctgcaaccttgtctgactttagcattgccatctccattaatcctgctggtatttctcctgtaaggttattattggatatgtccacatacttaaggaattttaggctactggtccaggttggtataggcccattgagttgattgttgtgtaaaactaaaatctgcaaatttcggagcttggagaaccaattaggtatctttccagacagtgcacaatcctctatggcaagacaaagaatattctcaaaaccattaattgcttcatcctgtggcatagcttcatttttgaagttgcccccgattaacaagacattgagattccttaagctcttgagtatgtgaagagtatttgtgatatttgtaaaattgttgtaggaaagagataagaaggtgataaacttcagatttcctatattctttgtcagctggccgtgaagcctattggaagatagtcgcaaccaagtcaaattactgcatgagtatatgctttctggaattgtgccggtgaagttattcgagccaaaatctattttcttcagattgggcaggtttgagaagttaaccttggcaagctctccttctaacttgttgctcctgaggttgatggttactagatttgtgcactcacccaaggatgatggcagctctccagataagttgttgctgcacatgtgaagctcctctagtttctttagctggcctatactatctgggatcttgccactgaatctattccatccaagatcaacaaaaacaagattacgtagctttatgatgagcgcgccattaattgttccttgcaaaccattgttagcaaaagagaggtactccaatgagatggcactgaagagatcatatggcagggtcccaataatgttgttgtgaccaacctttagcattctaagggaacagcatttacctatcccatgggggatgttgccactgaattggttgtaagaaagatcaagcacagcaaaggatgatgagctgatacaaaaggtggaaggtatgtagccagtaaaactgttgttgcttgcattgattgcaaacaggctgctcgttttctcccatgtggtggagggaaatgcacccgtaaacaggttgcttgagatatttagtacctggagtggcctttcaggtgatgaggaattcagctcctgtaattctccatctaggcggttgaagctgacatcaaggacgacgatgctgctagtagatatcagctctgatggaagcccgccggagagcaagttgtacgacaggttgagtcgtgacaagctggtgagctctctcagggacaatgagatgcgcccttgtaggcctcttgaggccagtgatatctcagttactgcaccatcttctccacagatgatcccttcccatgtgcaacaatctgtactattctgccatgacgcggcgagaccactgtcctgcgatagcccggcgatgaaccggaggagggagtgcctctcctgctcggtgcatgaattgacaggagagatgaaggtcagcagcaacacaaaagcaggatcaaagaaatttatgcgaaacctgctggttttgttgctgcgcgaagaatgtggcttcatggtttgtatcagttgtgagcttgatttgccaagataggctggtattgtgtgcaaagttatagttcctgggtaatatattgttgaagcaccgaagagttataagctgatggagtgttggctgttgacctatgagtttgcttgatgctacctcactggcttggagctatgcctaggtttggaagtttagtctaactatttttgttttcttttgccaatcttatgcgttagtctcatgatgcttgacaggagtggttccacttaaattggatttttggtggtacagttgccacttgactactacttcctccgtttcatattataaaactttctagcattgtccatattaatatagatgttaatgaatctaaacattaacatctatattaatatggacaatgctagaaagttttataatatgaaacggagggagtatttgttaaattctccactcgtttagtcctaaagcagagtcatagtccaggtctatgtcctctagtgatttcctttcatattcttttttttctagatgcaggtacggcgtacaaccgaacactctgcttcttctagtctcagtaattccagcagcatcatttgagttattttgtgactgttgactgttcttagcttgcgataatctttaacaacaatcaaaagattgacctcagttggttacattacctcttctttttctttttttttaatcctgaaatggtttggctacacaattaaaagagtaactgatgcaggtacattacatgtttgtgtgctgctgggatgcgtttgcttttgcttggttgaacaaaatttggtcaagcctgaaaatttcgaggttgtgttgtataagtctgtactgccgtagtgctatctagtacctcctccgtttcacaatataagactttctagcattgctcatattcacatagatgctaatgaatctagatattattatatataaagattcattagcatctatataaatatggacaatgctataaagtcttacattttgaaacggatgaatagtagtatatattgttttcatttcatgaccctttgttgttctaagaaatttcaacaatgtcaataaacgttacggcttataattaagtgtagacgaaatgattggagtcgatatcaaagcagcagcgcaccactcttggcttagcttcggcctcgtttagttcccaaaaaattctcaaaaaattcacatcgaatttttggacacatgtatggagcattaaatataaattaaaaaaactaattgcatagttagagggaaatcgcgagacgaatcttttgagcttaattagtccatgattagccataaatgctacagtaacccacatgtgctaataacggattaattaggctcaaaagattcgtctcgctgtttgcaggggagttatgaaattagtttttttattcgtgttggaaaacctatttcaacattggatctaatatttgatgtgacaactataaattttccgcgaactaaatgagacctttagctttggttattccgggctacgaggctacaaccgtaggatgtggaggaggaggagacgacgacgacgacgacgccattaacgaatctgaatggcggagaccgaacaacccaagaccagctcattaattaactgttggcaatcgtacatacaattatgaagatagttaaggatgtgttcatctggcctcctgtttggaaaaggatcttctagatcattgttagacatgttactgtaatctctaaaactagctattccccacgttttgctgctgaaattccaaagcagcttttattttttttaataatagagctaaaagtgaaaaatatattagttattaacaacaaataaaactggtttgtcaaactatgttcagagagaaaagaaatgcatgtagtacactatgtatgagattgtagatgaaatatatctcgcactttgattatatggatgaatatatattaagtattataaaaatgatggatatatatatgtgtgttaaaaatactatgaaaaataatgtgaaggaagataattggatgttgatttgtataattaaatgaattatagatgatgttgtatgcttgcataagttttgtatgtaattattgctaatggatgatgaggtggtatgattgtatgttgcgttttagaattagtgggttataactttacagtaagatatgataaagttgagcttgtttagtggttcaggtattgggccattgaggtagttgttggacaagtccaacacatctacaggtttttgatattacagtgggatctctccttgtaatttgtttagagccgaaatcaggacgagtaattaagagcttttagctcatcaatatctttcggaatcaccgtagtaaagttattgggccgtaaatcggaaatgggccaatcaccggctctcctcatagcccaagcagcctagcatgaagcctacatggcccaataaaggtatgtcagcggcccacagcccacccacagcacggtctgtaatgaagccccaggcgatctgacttctaagagatactccctccatattcataaagaaagtcgtttaggacaatgtttaagtcaaaccttgggaatataaattatgaataactctcaagttattgagtttgaaaatgtaaaaaatatatgaatagatttgtcttgaaaaatactttcataaaagtatacatatatcacttttcaataaatatttttatagaaataataagttaaagttgtgttttggagaccgtgtcgctatcctaaacaactttctttatgattatggagggaatatttaactattcgccatatttagatgtgacaattaactatttaccactgaatccatatatcatagacacatgtgaacctacatgtcattgagataggtgtgacaaatagttaattttcaaatctaatggtgtgtttggttggacttttcaacctgtttttgcttttgaaaaagtcaaaagccaaccaaaaagtacaaaagccagttttttgatacagtataaatcaaaagtggcaaatagccccgacttctgaggttctgaccatctatgtcgctctcgccctcgctctcgccaccgccgaacggcggccacgcgcacgtacgcgccggcgcggcggtggttcgtcggcgtacgcgctgagcagtgcaggagatcggatcggcacaggaaccgactccatgaggccgtgggcgatgctccagaggtaaaccaatgctgcaaagttcttgtgaaagggaaggccaatgatagcagtagctgctcgattgattgattcataccccattgtaccacagatttgggattgtgcctatgtgagatttggttgtgtctaagttgtttgtagctctgtagttctgcgtagatttctgatatttttcactgcagtgttgttggttgcagatttgttgtctcctcgtggcaaattgcgaacaaaaaaaatatcgaaatatttagtataaaatatctcgatgaacgttcacattcacattcgcacacaatattgacactaatttcaattcacttcactacttcagttcagattgtttacatgtgttcatcgactgttcggccatatcagttctctatttctaccttttggagcagactgaactgactgaatttctctaacagatcacggtctcaccaatcaggtttggttggggtgttcatttttctgtggctggagcggatgtcttggctctgctgaattgagaaacactcaagatcactacacatctgaagatgattatacatatttttttagataatggattaaactggcatctacacccaaaaaggatgtacacagcctgaagatgattatacatatatagagccagcgcacagtgttaactggttcagccaaaatatctggatatgattatctgatcatatagcacacctactccaaataacaaaccaagtgcaactgcaaagacgaccttgtcaatatactgctttgtggagataatggagactggagatgcttctgctgaattgcagtgggtgcaaaagcacagggctgcatagctttgggttcctataactgtcctataactggcacaggcccttcaaggtcattgtaagaaatgttgaattcagaaaggaagtgaaggtttgccagtgatgaagggattgctcctgtcagatggttgtaagacaggtctaacaccattagattcttgagattgctgaccaatacacatgtagtattcatgcatgcacgatcgtctcggacaaaggcacaattacattagccataatatctggacaagactagctggtcatacaacactccaattccaaagaacacaccaaaggcaattgcggagattgttttgctgctgcattgttgatcttcagagatagttgggatggtgtgagctacctctactgaaccacaaggagccaacatagatccacatagctttggattcccggcaaaactggagcttgagaacgtgttcatctggcctcctgtcggaataggtccttccagatcattgtcagaaatgttgaactttgagagaaagttgagcttgtttagtgcttcaggtattgggccagtgaggtagtttctggacaagtccagcacctgcaagtttgtgagattgcagatagatggtgggatctctccttgtaattggttagagctgaaatcaagatgagtaagagctttcagctcaccaatcttgggtggaatcacactggtaaagctgttagcactaagattcaagagtgcagggaaagatgtgactgcacggtattgtcgcgatagagtggttacatacacaggtagatcaaatagtattgttcgatgagctttgtaatcatctgattttagcatgggtatctctatcaaggtggctggtatttgtcctgtaaggctgttgtttgatacatccaaatagaagaggttgttgaaggagttgagccaactcggcattggcccagtaagttgattgttggataaatctagtacctccaaattttttagctttgatagccaaagaggtatgtttccgatcaatgagcaacgataaattgagagatgtcgaatactctctaaactttcaattgtctcatcttgtggtataacctcaccccagaaattctccccaataaacagggtagtgaggttccgggagctcttgaaagcatggagtgtctttgcaatatcactgaaagagttttcagtaattgacaggaaagaaaggtacttgagatcacctatttttgatgagatctcaccatgaatttggttggacgatagccgcagcgcagtcaaattgttgcatgagtatatgctttctggtattacaccactgaagtcattatgcaggagatccagggctctcagattgtgtagggaagagaagtcaacactgccaaggtctccactgaagctgttcatcttcagatcaatggttgtgagacgtgtgcagtttccgagactcgatggtagatttcctgacatgttgttgttgctcaacctaatcacttccagcttcttgagctgaccaatggactccgggatctcaccatgtaaattgttggtcgagatgttgagcacctgcaactgcagaggatgcttcaagccagtcatcaacattggcaatggcggtagcactccgtcgaggctgttgaagctgacgtcgagaacaaccagactcgcagagtacatgagctccggtggaaggctaccggagagagcattatgagagaggttgagacgtgtcaggctggtcagaccggcgagggacgacagtgagatgcttccatggagtcctcgagactgcagggaaacctcggtgaccgtgccttcgtcgtcacagacgacgccctcccaggcgtggcagcaatcgacgtccggtcgccacgacgcagcgaggccgccgtcgtgtgacagcccggcgaggaagcggaggagggagctcctgtcctcctctgtgcaggagctggccggagaagcaaagagtatcagcacaagaagaaggcaaaggaaatgagtgcaaaacctgctggatgatctgttgctgtaggaagaatgaagtattattggattgttcatggtcagtatctgaattaagctggtttggaaactgatgtgctggtagtagtagtagtagtgagcttgatttatgccgaaccacacggttcctgagcattatattatattgtcgaagcatcgaagagttatataatctggtggtgtgttgacctgtgagttcactttgctgctaccctacctaagctcactactatctgcttggtgccatgcttgtgttttggaagttcagtccaactattgccgttttctcttaccaatcttgtgttttggctcatgatgcttgacaggagagcttccacttaaattggatttttcctcgtacagctagatggctacttgattagaatttgttaaattctccattcgtttactcagagtcatagtccaggtctttggccactactgatttccttttatattcttttttttcccgctctagagggagatatggcgtacactttgtgcttgtgatcttttatcacttcaagcagctgcattttgaatccgtcaccaataactcacttgtgacttttgactgctcttggcttgtaataatcatttgcagcaatcgaaacatcaacctacattggttacatacttctttttaaaaaaacttgaaatggtttggctacactgctaaaagtttaactgatgcaggttacatgtttgtgtgctgctgctggtggtggaatgcgtttgcacttgcatggttgaacaaaatttgatcaacccttcaagtttcaagtaacatttgtaaaggttgatcaagccttaagtttcaagaaaaggttgtgttgtttgctttccaaatccaatcctttacaaagcctgtactcctgtactgctatagtgctgtccactagtagtatattgctttcatttatttttcagttcaaattcttgcgattgttgcttctatgaaatttcataaaagtttgtgtgaaatttctatgtcacagacagctcttggattcgcatgttccagatttactatgtctaaagtctgatattatctcagatcgcttcggctctcgttccgggtttgtattttataatttcagatcactacaaatgtgcgcagtccaaaaaaaaaaaggagacgtggcaaactgctagctaggtttgtaatggtggaattaacttgctcgggttcaagtcttagacttgatatggatactaatatttgccgctaaatattctttcagttgacaagagtaagttgcccgggatgattttgtcagtctcaaattatgctaactcaatttttcgaagattctcatagatattataagtgtgtatatatgtttattagtttatagaggtgaatatgcacgtatgtatatatatatatgtatgtgtttatatttttttttagaaaaaagtagaggcatgtatgagaaatctatcatattaatatgctacgacccggcataaggcatatcttgacgttttgatattcagttcctcgatcggaactatgattccatagtgaaattattttagggattcttttaaacgcatgaattttatttaatttatagtgataaagttatggggtatataatttcacctaccaaaatttaaatagttatgacaaagaataatacgcacgcacgaatattgtatattgtcgatgcatcgaagatttacaagttgatggagtgttgacctatgagtttactttccgctatctccctagtcacttggtgctattcctagggtttttcctctctcatttcctttttgccgacatgatgtgagtcccagattgtttgacattataccctaattaaaaaaaatattgtttgacattgacaacgcttattggaccaagtaaatttcctcaccatacacctggcctcttgaaacacgcttttatattataacacggcttgttaaattctggtttcttttaccatgattgtgacgtacactgccggcccgctgctaataatctcattactctctctatcatttgcattttcgtaatctaccctaacaatccatttgctctaattgcattacttttttttctctcttgagagatggttggttgggttactgaaagagtaaactgaagcaggtatataacatgtttgcgtgcatggttgggctactgaaattcgtttgcgtttgcatggttgaacaaactttgtgccttcaagttttcatatatatcccttcgttgttttctacgaaatttcaataaagttggtgtgaaaattctatgttacagtcttgtatatgcatattccagaattactctgtctaaagcatgtcagattccgtgctttgttccggatctgtatttttatacccttccttcagtctttcaggcaactactagagaaagtacttatataagcaggcttggaaaattgtcacataaaacttatatttagatggtgtcatggtgaagagaatagagtgaataattaagggcaccaaatttatagctagctataggggaagacactgtgtaaatgagagatggattgggtattaatgatgtaggagtagtatatatttataagtaactattccatagtaaactattagactctatttggaggaatataatattctaataagcagccggttaatatccagtttctgagaatttagatagctaaaactcaaattttaactttttattcattttctagattttacaattataaattcttagaatctggcttagattctacaactattagagcaaggttaatagtgtcgcccattgcttactcttgtagtcttccatcttagttatagacgtcaatgcaataatttcttcatcagctatttgttgatgcgaaaaacctaaatttggtcgttaacgctattgtacgacacattctccaatacaaagcatactttattcccctttctctccaagttgttcacctttctctttcttctttcacttgctagtgttttcaccatgagcttagcttctagctagcaacaaattaaaacattgcaatagaactcttgcataccgagcgtggtacagctaagctggagatgacgcggccgagctcgagagcctccttcgatgccgtcgtcgagctcgacagcgagtgggctgagctggttgtttctatgctcaagagcacctcctccaatgttgttgccatggaccttcgcgcttctctcccctccatggttggcctaatcttcaagtgatcgtccgcacgtttgatcgcacaggaccacgtggcgtcagcatgcctgctgatgacacctaagttttttagagcctgtgtatagtcggcgactatttagtcgcctgtttgctctctctctctctctctcatcccgcctttcttctccaaatcatcgaaaaaaacaacgtggcacacatatcgttggctaatatcgttctattatatttgctcttaattgtttggggagttgaaactttagagaaaaaccacatctgctatgtattttcttagctcgactctctaaccgtactattaccaatgctaacgaattggtagttttcattttggcccttctttcatcatcgcgatttttgtttacggccaggaagttttacaacgtagcccctgtattagcgtggcactccgtttccctcctctccgcctgagccgccgccaccttctccccaaccatggagtccatgagttgggcaagcgagagcatccggcgaagcgagaggacggcgccgcggcgatcgaggagcggaaacctcgaggtgaggttagccatgtctctttccctccttgattcgagccgcggcgccaggaagcgggaggaatcaaaaccccccgtagccggccggtgaacaatcgcgtcgctgttctctctgcagccgcctcctcttgattagattgatttgctgatgtagattctacaaaggtctagttagaaggaaggattgcgtagagtagccgcttcatgtcagatttgggatgtggcgcggcatgagttttttttgtctgcaacgatttatgacattttctcaattcagtattgctgtttcactagttgcagattgtgatcccctcacagcaaattgcagagatagttgttggaatatagccacaaattaatacaagaacgtttacattcatgtgtaatattgtcaagatttatgtactggcaggtttcagtttacttcagttccttctgattttctactttggagcagactgtattaactgaattttacgaacatatcacgagctggtcaaatcagcttttcctgggtattcaactattcatcctgatgggggtggaaccactcgagatcaccacacagttaagacggttatagtaatcacaaagtcgcagctgttgctttgcttgtttcatttctatggcccattccatatctacaagccattaatccagtacatgttattgactttctctatcgtaatcggtttaaccgaaaatatctagatacaactatctgatcatatagcactccaattccaaagaatacacaaaaagcaatcacagggatgaccttgttgatgtaatctttttttgagcttgggggagacaaatctgcttctgctacattgcaacggtgcaaaagcatcgggctgcatagctctgggtttccagcaaaactagaacttggaaatgtgctgaactggcctccaattggtacagacccttttagatcattgtaggaaacattgaattcagaaaggaagtgaaggttcaccagtgctggagggattgcacctgtcagatggttgtatgacaggtctagaaccatcagattcttgaggttgctgatcgattgtgggatctccctgtttaggttgttgaagctcaagtcgagtgaaacgagtgctttcaactcaccaatctccatcgggatcacaccagtgaatttgttattacctagattcaacattttagggaaagcagtaactatacggtactgaaaacacagacatgcgcctgcatacactggaaacggaaaggctcttgggtctgagtgtagaaggagatttggatcaaccgtaactttcattgatcaatggagcttatatttatacatgtacaacaaggcttgggagttgcctgggcctaactaatcccctgatctaagggacgtgcagcggtgcgagcggagcgaggagcgcggcgtcgtgcgcggggtgcgcgtcgtgcgcgtggagcgcgcctcgagagtctgacgaagccgttcgccaacacccccccgcagtcgcagccgtcgtatcaccgacgcagagactggctcggaactcgttgaacatgcttgaaggaagcccttttgtgaacacatccgcgaactgatgggcactcggtatcggtaggacgcggagttcaccgagcgcgaccttctccctgacgaagtggatgtcgagctcgatgtgtttggtccgcttgtggtgcaccggattcttggacatgtagacgctggagatgttgtcacagtaagcgatcgtcgcctgtggaacgcggcagtggagttcaccgagcagctggcgcaaccaagtgcactccgccaccgcgttcgccacacctctgtactcggcttccgcacttgacctcgagacggtcgtctgccgcttggacgaccaggagatgagggagtcgccgaggaagatgcaaaagccggacgtggaacgccgggtgtcggggcagccggcccaatctgcgtcgctgaaggcggtgagcgtcggcgacgtcgaggcgcgaaggtgtaagccaaacgcggccgttcccttgatgtagcgcaggatccgcttcagcagggtgacgtgagcttcgcgcggagcatgcatgtgcaagcacacctgctggacggcgtaggcgatgtcgggccgcgtcaaggtcaggtactggagagcgccggcaatgctgcggtaccaggaggagtcctggaagagaggcccctcgtcgcttgacagcttgggtttagcgtccgccggagtgtccacggccttgcagttcgccatgcctgcacgttcgaggacatcggtggcgtacttggactggctgaggacgaacccgtcggcagtgcgctgaacttcgatgccgaggaagtacttcaggggccccatgtccttgaccttgaactccgcttgaaggcgatcgatgatgcgctgcagcaagctcgacgaggacgcggagaggatcatgtcgtcgacgtagaggaggaggtaggccgtgtcggagccacggcgcagcacgaacagggaggggtcggcgcgggactggacgaagccgaggctggttgcatgatcggcgaagcgcttgaaccaagcgcgcggggcttgacgaagaccgtacagcgaacgggagaggaggcacacgtccgccgggcgagcagcatcctcaaagcctgtgggctgctggcacaggacacgttcctgaagatggccgtgcaggaacgcgtttgaaacgtccagttgatgcgccggccattgcttggaggaaatcagcgtcagcacggtgcgaatggtcgctggtttgacgacgggcgagaatgtctcgccaaagtcgacgcccgggcgctggttaaacccgcgaaccacccaacgtgccttgtacttgtcgagtgagccgtcagcatgaagcttggtcttgaagacccacttgccggtgatgatccgagcaccgggaggccggggaaccagagtccacgtcctgttcgcgagcagggcgtcgaactcagcctgcatcgccgcgcgccagttgggatcccggagcgccgcgcgaacagacgaaggtgtcggcgacagggtcgacgtggcagtcatggcgtaccgcgggttgggtttgctgatcccagcccgcgcacgcgtcgtcatggcgtgtcgaggtggagaggcggacgctggcgacgacgtctcgggtgatggaggcggcgcgacgtcgtgggccggagcagcactgctgggcgtggacgacgcgggcgacggaggcgatgcggcgtcgtgagctggggcggtgccgacaggtgtgacgacgtgctgtgctggagcaggcagcagcacaatagtgtcatcgccgtggtccggtggcggaggagctgacgggcgaggcgatggcacgtcgcggaaggggaacacgtcctcgacgaacgtgacgtggcgcgacgtgaacacccggcgggagaccatgtcgtagcagcgatagccacgatggtcagccgggtagccgatgaagacgcacgccagggatcgcgggctgagcttgtgcggcgctgtcgcgatggtgttggggtagcagaggcagccgaacacgcgaagatgatcgtacgtcgggggagcgccgagcagcagctggtacggcgtgagggagcccgtggcgcggcatggccgtcggttgatcagatgcgtcgccgtctgcaaggcttcagcccaaaaagacaaaggagcagcgctgtgaacaagcattgtgcgcacgcagtcattgatcgtccggaggatacgttccgccttgccattctgttgagaggaataggggcaggagaggcgaagaacagctccgtggagagacaggagtgagcgaagtgcataagaatcgtattccttgccattgtcagtttgcagagctaaaacggggagcccgaactgtgtgtgtgcataagcaaagaaggaacgaacagtatgaaacacctcagatttattgcgaacaggaaaggtccaaatatagtgtgtaaaatcatcaagaaataccacataatacttgtaaccggaattgctataaatgggagaggtccaaacatctgtatgcactaactgaaagggaaatagagtctgactagatgaagagtggaaaggaagccgcacattcttgcctacatgacaagcagaacagtgatggggggctgatttattacattggaaatcaaaggaaccaagaaccttggacagggaagcagagccagggtgcccgagccgcagatgccaatgctccaccgacggcgaggaagtcgcagagagggcgtgtggcgatggcagacgcagggggtacaggtcacccgggctgtcacagcggagcttcaccacctgagtttgaagatccttgatggagaaaccagttggatcaaattcaatggagacattattatcacgagttagctttttcacagagatcaaattcttaatcaagggaggagaaacaagcacgttatgaaggtgtagatcagtggaggatgtgggaatgtgggtggaagctgtatgcgtgacaggcagcttggcaccattgccgacagtgatacaagaggagaaaggaagaggacggggatgagcaagaataccaggggtggaggacatatgtgctgacgcaccggtgtcgaggaaccaatccgcagcgctcggaggagtggtggtggcgacgccggcggactgcaaggcgctgtagagcgcactgttgtcccaggcgccggtggattgaactcctggagatgccggaggaagagccggaagcaggtgctgcgcggtcatggcctgttgggcctggaacggcgggcgagggcccaacacacccgcgccgggagcccggaacgggaaaggccaggcctggacaaagcctgtccaggggttgtagccccaaggcgcaggagggcgaggctggccgtcgtgcccggcaccagcgccgccgccaggagtcgaaggagcgccgccaggtggggcgccgccgccccggccacgacgcttgccccgtcccttgggacgaggctggccggtggtgtcggaggtgccggaggaagacccggtgccggcgtagagggcctccccggcttcagccttggcgtcgtgctgcatctggagctccgccagcagcaggtaggagcgcgcggtcatgaaagtgtgtggcggattccggtcggcgaagctggcgcggagggagcggaacttggtgttgaggccgcgcaggaggttgagcacctggctgggctcagacacgggcatgttgatgtcgcggaggccgtcggcgagttgcttcagcttggcggtgtactgcgtgatggtcatgtcaccttgattgatcgagcggaactcggtctcaaggtagacagaccgttggacggcgttgtcacggaagacgccttcgatgtcgctccacacggtgaaggcagaggcgcggggcttgtagacgacgtcgaagacgttcttggcgatggagttgtgcagccaattgaccacgcagtgatccgcacggcgccactcggcagtgcggaggtcgagagcgggcggctcctgaacatgggcctcaaggccgaacttgccgaggaccgattcgaagctgtagcgccactggctgtagttggagacgtcgagatcgaggacgaccgggacgtgggagcggatgttgacggtttgaagaacagaggtggaaggcgccggcacaggctcttcgtcagaggtggacgaggcgtcggaagcgccggagctgtgcgacatggctagcaagggagaggtagcggaagactaagatcagagggtcactgataccatgtagaaggagatttggatcaaccgtaactttcattgatcaatggagcttatatttatacatgtacaacaaggcttgggagttgcctgggcctaactaatcccctgatctaagggacgtgcagcggtgcgagcggagcgaggagcgcggcgtcgtgcgcggggtgcgcgtcgtgcgcgtggagcgcgccgcgagagtctgacgaagccgttcgccaacactgagttatctgcaatcttatctgattttagcattggtatctccattagtgcttgtggtatttctcctgaaaggctattattggatatgtctacatacttaaggaagtttaggctattgatccaggttggtataggtccactgagttaattgttggataaatctaaaactgccaaatttccgagctttgagagccaactaggtatttttccagtcaatgcacaatcatgtatgctaataccaaaaatattctcgaaaccatcaattgtttcatcctgtggcatagcttcgtgcatgaagttgcccccaattaacaagacattgaggttccttaagctcttgagtatgtgaagagtatttttgatatctgtaaaattgttgtaggaaagagataagaaggtgatagaattcagattccgtatgttttttgtcaactggccgtgaagcctattggaagatagccgcaaccaagtcaaattactacatgagtatatgctttctggaattgtgccggtgaagtgattcgaggcaaaatctaatgttttcagattgggtagattggagtagttaaccttggcaagctcacccgtcaacttgtttctcctgaggttgatggttactagatttgtgcaatctcccaatgatgatggcagctctccagataagttgttgctgcaaatgtgaagctcctctagtcttttcaactagcctatagaatttgggatcttgccactgaatctattccatcgaagatcaacaaaaacaagattgatgagctttacgatgagagcatcatcaattgttccttgcaacccattgttagcgaaagagaggtactccaatgatgtggcattgaagagatcacctgggagaggccctctgatgttgttggcattagccttgagaagtctaagggcagaacatttacctattccaggggggatgttgccactgaactggttgtacccaagatcaagaacagcaaaagatgtcgagctgctgcagaaggaggaaggtatgtgccctgtaaaactgttgttgctcgcgttgattgcgaccaggttcctcattttctcccatgtgatggatggaaactctcctgtaaaccggttgcttgagatattcagtaccttcagtggctggttagatactgatggattcaactcttgcaggtccccgttgaggcgattgaagctgacatcaaggacgacgatgctgccagaggacatcaactctgctggaaggctaccagatagggagttgtacgacaggttgaggcgcgacaagctggtgagctctcccagtgacggtgagatttgcccttcgaggccttttgaggctagatgtacctcaattacagccccatcttcgttgcaggtgatgccttcccacaacagcagtccatgccattctgccatgacatggcgatgccaccgtcttgcgacagctcagcaatgaaccggaggagggagctcttctcctgctcgacgcaagccatggcggaggtggccacgatgagaagcagcagtagcgaggccattgaaaggcatgactagcctgcttctccacggagaatgctgtgccatctgcatgatctctctcatcggagctgcgtttggagttatatgtggcaatctggaagctaaaatgttcgcgaaaacgacactgtttcaggataataatgcacatggctgctttcttgatctattgcgtttgagtctttctatcacattgtttatctttattgttttcattctatcactggtagtgatgtgactcattctatcacattgtttatctttattgttttcattctcgtttcagtttatatatatagtagaggtccccgccttcccggtttgagtttttgttcctagttctctgtcgttttactctgaaatttcaacaattttgtgtgaaatgtttcatgttaagaactcagattccgtttgtggtcgattccagtctaattcagttgtgtattaaattaccacatctgcttgcgctggcaattcatgtttgcaacgtgcattgctactttgtacaattgcatcccttatattaagttcgaatttgtgcttacattaactttgcgttttcacttacctttcactttcaacttttgcctctgaataattttgttcacttgttcggctagttgtctcgtatgaactggaactggcagaattttaacattgagatgattgaaatctgtggtttgttcggagagaacgctgtggtcacgcggcctcttcaccacgccgccaggctgggaccgcggccgccgtcgatctccactctttagccaccgcctgggcgtctctggccaccgcctgagcatcttcgcaccgactagataagagataagtaaagtggagatactcgctaggtcccatatcgtcttttgtcacgttgacgtgtcgcatgagcaaaagtagcaagcactatctccatttcatgttataagtcactttatttttttttctaattcatttttttagtttgattaagtttatagaaaaatacatcaatatttttatataaaaataaagaaattaccaaaatatattcaatgttgtattcaataaaactaatttagtgctatagttgttatatttttctataaacttttaagaaattagagtttaaaaaatcaaacgacttataatactccctccgtccctaaatataagggattttgggtggatgggacgtatcctggtactacgaacctggagatgctcctatctagattcgtagtactgggatacgtcatatccaaccaaaatcccttatatttacggacggagggagtatggaacagaggaaataattaaaaagttatctattaagaggggaaaataggatcaaatctaaaaatagcatttgaataattagtggtaaataattaagtctccccaaagattggttgtagtcttgtagagaccatgccagattgccaggatgccgatggatgccgggccgtgcgctctagctcccggagatttggccggccctccctcggaaacggaaacagtaaaaaaaaatacgaatgatatcggaaatagtttgatagtttactaaccattttattcggctaccatattattccggtaattagggatgaaaacagtcagaaatgatcggaaatggtacattattttattttattttttgaaaatgaacggaaatggtcgggaaattttgatatttatgaattcatctatttagtgccaacttcaatgccacgctgacagaaattaaaaaactaaattttgaaaacggtaaccatcggtaaaaatattattattatactagttttacggaaacggtatcgatatggtcgggaaatttccataccgttttcacccctaccggtaattgctgtttatatattatatggtaaattacagtttttacaaacatccttgaccggctggcccaaattatttttctatggcccattctttcagcccaactatcctagtccaccactataactcatgtttgtgtatctcgtattgttatgttatagctttatgaacttacacttatatgtcaatggatttatatttatcatcgaatactttaacattatcggttatcaatttgtcataaaaaaatcacaaatcacaaattctaaaaagaaattgcacatctcaatggaatcacaaattgtaaaaaaaaaaaaaaaaagaatcggccgctggccgcctgccgccgtcggtcacggccccgctagccggccgcctgcccgccgctgcgcatgggcccgcctgtcgctgccggtcgtggccccgccggtgggccgcctgcccgccaccgcgcgtgggcccgcctgctgccgccggccgccgctgttgccatgacacgcacagatgggaggggagaagggggaggagaggggaggaggacgaggaggggaggaggaggaggaaagggatctggatctggatctgaggggatgattcaatcttatatctagctacgtatctcggtgaggagtccgttgggacttaaccgatcggatcgacgattgtgggagagagatatttacttccggttgataactccaatcgggactaaagatggatttttagttctgatctctgccgccttgacatcctctgacacaactagaaccaggactattgtgaattttggacaacccggcaaagatcacttctccaatagtgatatcggatggctatgatttcttaccgatgtttctacaaatatccaagagagaaagcagggtacatggcagtaaggggcaatccaaaggagtcctaggagctgtatatcaaattcaattctatattgtttgtatgatacgactgtaattatgaaaaatcgaagctacaagttctacatcaagttctattctgctttaaaaatctagctccgtgtaaaattgtatgggacggtcgaaaatagcagaaaaaaaaaaggaatgacaccaaatttcaaaaccaataaatacagagtacgtaggtagtctagatgaacctgggaggagatacgtgttgtatttgtaagtttgagttggtcgaaaggaaacacatttgatagatcttgttcgacggaaatcctaattaattataacgctcttgactgacggtcacggtcgcgcttaacgttatcagtataaacgaattcctataaaaaaataggaagtttaatcattagctataccagccagttgaaagtttcattaatttcggcgtgttgaattgaaaattcagtaatagtaggaagtttccaatattgatcattttcttgaatgaaaagctagcttcttaaagaaagttttagtctaagtacacatagttgaattttttttttgatattacacatagttgaattagtatatatagaagcacactgacaaaaacgagacgtacagaaaatccgagaaaatctttaaggtgtgtttagtttcacgttaaaattgaaagtttgaagaaaaaagttgaaagtttacgtatgtagaaaaattttgatgtgatggaaaaattgaaagtttgaagaaaaatttaggaactaaacaagcggtaagctatgaagaaatttggccactaaaaaacaattcaagggggctggttttttgcaacgcgctcgcggaagatgtctccgcggatgtttgcgtgctaattaattaagtatattaaggttgacggacccggtacgtatatgcgtgttcgtacgtttgctatatatatacggccacacaggcgaagctatatatattcactgcatatatccgtacgtacacaagaccactgcaatcacaccaccacaaggtcccaataaccctagctagccagcctgcatttcgatcaagctattcaattcgcacaaggccaatcgatcgatcgatcatagtcctagtttctgcatgatgatgatgcagctcctcctagtgatcatcatattgtccacagtgatgatctcctcgtccgatgcttattatcaatcatgcagatgcttgggtgatggcaagaacaaccagacttcctgtgatcaagcgatcgacgactccatcaaaggttcaggtccgtctttttttgcagcaaaattctctctccaaccaaaccagtagtacactcattggggcaaccctttgcagggcagctaatttttcgacgcatacagccgccgatcactagcgtcgcctttaatgtgagcttcatcggaagcctcgccttcatcctccgcccagtcccagctggaggagaatatagcaataatagcgatgcctatggctccctcgtgttctccggcaacacttataataaaacgacgacgattattactcattctgactgctgcagcactggcgacagtagttccaacgtttttgttaagatgggtgcattaaaaaatgtttctacctttggtgtaaacattacaatctcacggaaggcctccaatattcaaatagtacaagggaacaactacaccatatctgtatggattgattacaatcgtgcagctgaagctgcagatcgcagcatatcggtcttcgttgccaaggcaagagagacgaaacctaaggaagccataatcgtcaacaaggacgacaatatcagcaaaggcgcaaccctgcaaggctgcatcttctcgtcgatggacctgcaacgactccatcagatcagtgacatggatgtgacattcgcctatggccaacatgttagccatagcccatcgaggtcgttgccgaccatactggcatcagttctcggaccagcaggcggtgcagtcattgctgcagctgtgacatggttatacttcaactcctcctacaggaggtggaagaaggacttcgatcagctggccaagtccatgcaaagcctccccggggttcctgtcaagatcagcttcgccgatatccgcaaggccaccaacaacttccatgacaccatgaagctgggcagcggcgcatttggcgccgtctacagatgcaagctccagtccttgaacttgaaggagcaaccggtggaggtagcagtcaagaagtttacacgtgccgacacccggtcctaccaagactttctcgccgaggtcagcatcatcaatcgtctgcgccacaagagtattgtccctctcatcagttagtctcctccaattcttgtacagtttaattttctatttgtcaatcgcctaatttttcatatttatcggtctcctaatctaaatttgcgatcctagctagctactccctccatttcataatataagactttctagcatatgtgtctagattcactaacatctatattaatgtggacaatgctagaaagttttacattatgaaacggaggaagtagttgttagttttgtcgttaaatatacgtttccatacatacatacatttcattttgtgacaacaagttgacacatataaattattatatataggttggtcatacaacaaaggagagcccctacttatctatgagtacatgcccaatggtagcttagacaggcacatattcgctagaactgaccagctgcatggtggccaccatacaacgatccggcaatgggacacccgctacaacattgtcagggatattgccaccggcttgcactacgttcatcacgagtatgagcccaaggtgctccaccgcgacatcaaggctagcaacatcctgcttgactccaccttccgtgcccgccttggtgactttggtctcgcctgcaccgtcgccgtcggccggagctccgtctcgtgtggtgtcgcaggaacattcggctacatcgccccggactacgcaattaacctgaaagcaacgcagcagactgacgtctatgcgtttggggtgctggttcttgagattgttactggcaagaaggcgatgctgaatgacgcacaatttggccatatcacagattgggtctggcatctccaccaacgggggaggctccttgaagctgtagatggcgtgcttggcactgccggccatggtgagttcgatatcgaagaggcaagacgcttgcttcttctaggcttggcgtgcagcaacccgaacccgtcggaccggccaacgatggtggtggcggtgcaggtgattgcaaaattagcaccggcaccggatgtgccacttgagaagccgactgttgtgtgctttcctcctctaactttgccagtagggtcttcatcatctgaatgcactgattattacgtcacggcaaagggtagtctgcagatcaagagctcaatggtatagacagctagcatgcatccccataggattgcaggtatatatgaattctgaaagcagctgagaatgtgagtgttgattgtatttgtattcagtaacttgctagttactttatctcgtccccttagatctgttttagcattgtgcagaaatatcattttgttatactcgctctgtttgtaaatttgtttggtgctccatggtgcccgggctccatgattcaaaacaagtttgaactgaatttaaacatgtttttattacaattttattctaggtatatagcatccaaacatataattagttaggtatgtaatattgaattgtaaaataaagttaaatttgagttgctttgttgctaggtatagatatgaatcgaatacttataactaggtatatactcacaatttaaaaattttgaaaaatttgggcgaatatgtgtatttcataccatagtgccctatatgagtgtcctatatatagtgtgtgtgtaaatctctactattataaaaattgataatgtttccgttggatctttagtacgttgttcgtatttaaaaaatacagtgtttctaccaaggtgtgaaaaaccgccggtaaccgcgcggttaccgcggttaccgcccgtaccgcgggggtacggttacccgtaccgcgcggtacggtttaataaaattcgtccaaattcaaaaatttaaaaaaaaaagaaaaaaatcaaaaaaaatagtgaaggtagtgcttgatttatagtgttttatggtgaagaaatttctcaaaaaagagtaatatttatttaaatttgagagcaaaacggagaataaatttgaaaattggaaaaagaaaaaaaaatgggccggcccgttactgtgcaacccattacacatcgcgcggtaaccgcgccaaaccgcgtggttaccgcgtcaaaccgcgccaaaccgcgcggtttgcccgaatttttgaattcaaatttcgatttgtaaatttgtcgcggttttgcgcggttaccgccggtaaccgccgtaccgccgggtggcggtaaccgggcccccggcggtttttgaaaccctgactttctaccctcctcagatttctatccgtctctcctaattttagtcagttttccacgcgttggctctgttcagatcgctctcccatgtgcgtgacacatgttggccctgttcaggtcgctcttccacgtgtgtgacattggattgatatgcgcttctgcgcgcatgacattagatcgacacttgttgtgtatgtttccaatcggttcgtttgcaacgcatagtttcatggttagccagacacgaccgcatcaacaaatacagcccaagtcctatgcaataacgattgtatagatcaaaggcaatatttctaaataaataataataatctcataaaaaccagaatatatttttatagtatctataaaatttccaatctttttaaatattagcaagcctttttaaattttatagatactttaaaatatattctagtttttatgagattattattatttatttagatatatatatatatagacacacactacacataggatgtagcatgcctaaaacacaccccacaatacaccagcccgcaccccccctccccaaccgcacagtgcggaccccccaccccccggggcggcgctcctcggatagtaattcgattactgtcaactgtacgtgttatttatactactcggtggcccaaccgtccctacttcttccccgcgctctccattattttcggatctagccctcgcgtacaccgtagttagccaagccgctccgcctcgtttccatcgccgccaccaccgcctccccgtccgcctgccgccgccgccgtgtgggaggggatgccagacttgggaggtgacggcgacgaagtagagaaggcgcccaccctctcccctgcggctgtggcttgtgctcggggatggatgcggcgacgggcgacggcgacggactgcggcaatggcgagcgacgggctcggcagggctgtcccccgctcgaatccggtgacgacggtcgtcctccgcccggatccagtggtggcgggcgtccctcgcctgacctcggacggatccaccggcggcggtgggaggaaagcagcgtgcggcaggccaccttgcagtcctctcctcctcttcctcctcccgcttcttcctgcccgctgccgtcatcatggttgtcctccaccagctctccgcgtggccgccgccgtccgccgatggacgtcgactctgacctggccgacaagggcaagcccacccagatggacctcgaggaccaggtacgccgaagccgctcgactcgtccccacaggaattcttctttcagttttttattgtgactgcctaagcttggagagcatctcaatttccgttgaaacacttcagggaagcatttagctctgagatttcatgagacttccatctattatcctaccaaacttctggctggttcgttagttctatgtgatctggatttggtttgtgtaacactaacatccattgatattctgaatttttcaggcttctatacatctacaggtttctgtaattgataggttaacaagcttttctaatttatttattttttggtgattgttgcttttgctggatcaagcatcatgagtgaatagtcctgatagccgagtttttttttttttttgcaacgcatgaagaaccatatgctctcattttaattttcatttgttcagtcatgaattgtttgtgcaatatattcagaaaagtgctcccatctgaatttcatttgttcagtgatatatttgtgtgtgcaatatttggaaaactgccaatagcatcatcatcaggttctctgatattttttataaatgaaaactctagaagcttgattcaatagcagttcactgaaattttgtggttcaacagagcatatcaattgattttctctgaactgctctctacatatgatccttttgatcatagtttttcgctgaatattttggttgaacaaagcagttgtagtcccctatgagcttttttctgctgtagatgtagttcatgttctgattttttttttgttgatgaacagatttctcaattttggtctacttgatttttcatccatagactacaggaatgctctgaatttgtggagttttctgcacctcagctgacgatcatgggggaggctgcaaccccagcgaggcaggaggatgttttccaggtggcgggtcacgcctcgtcgatagcatagatcacacatgggcagaggaagctgtggatagcatgatgggtctgctagctgcaaggttcgttgggttgcagctgagctatgcatttttttagctccttttatttttctcaagcaattatctttgtggttcaacaaagcagatcgatacatgttttcctcaactgctcaatgcatatggtccctttgattaggttcttgattttcttgtaaaaatgcgtacaacctgtcaatccattgaattttctgcaattttatggttcaacagagcatatggattcatttttctgaagcactcactgcatatggtcatgttgatatgggtcttgattttgttctacaattgtgtagaatctgtcgatccatcgaattctttttgatactgctcttgattttgtacagttcattgggtggagctttctcttggggggtgcttttgcctgccatggtaaggccagcaagatgggatgaggcttcagctggctagtggggatggagatgaaatcagaaatcaggatttactgtcttttgtagttaataatcagcgtcgtcggccctgatctacatttgctatattagtgctggcatcgatcggtatcggcatatgtattagcgggtggtgttgatttgattttgtttattagttttgtgtttttctgccgatgtatcattgcgtgcattatcagattgttgatgtaacaccgacactggatcaaacaattcatgtttgtaaagaaattattaaattgtggttaggttaataatatgaatcataatcttttaccttcatttgttttgtcactaaatactccagcggctttgtgcaatctgcaatatatttactccagtatcaggagtaacttattttactaagagaagtccaatgacgtgcaaatattaatttatttactaagagaagatttgcaaaccaattagagtactaatatactaagtaatttataattacttactaagagaagagctgagaacgatctgagagtaatttatttactgaaaggaggaatcttcccaaataatctaggagtaattcatttactaagagaagaaatcaatttggaagtgcggaagtgttagtaacttatttactcttaggccgaaagacacagtaatcttgttactaataggcaaatcaccaaaaaaagtgtttgatagtacttaacgaaagaattttttggagagagagggatgaggagtttgtgcgggatggatgtgcgtggggtgatgcgggggggggggggggggggggaaggggggtggggtgggtgggtgggtgggttggggggggggaggggtgctgaggggagcgttttagttgtaacgcaccctgggtgcggtttagcgcgtccctatagtggacagtgtgataataaaaaatatctttattttgttgctctatttacaaactaaacttagactttttttaacaactttaaaagaaatgtattgctaaaaatggcatcaattggaatatttagttcacgtcaaaattagaagtttgattgaaattggaactatgtgacggaaaagttggaagtttgtgtatgtagaaaagttctgatgtgatggaaaagttggaactaaaccaggcctcatattttaagaatgaggcctgatttagttctcaactttttcctcaaactttcaacttttccatcacattaaaacttttctacacacacaaacttccaacttttctgtcacaaacatttcaatttcaatcaaacttccaattttattgtgaactaaacacaccctgcgttagaatcaactatacattgttagagacaaatggagcttctagcaaaagctacatctgctagatataacgtgtcaattttctgagctcatctcattattaccaatgctaacgaattggtagttttcattttggtccttctttcatcatcgcgatttttgtctacgggcttacggccaggaattttacaacgtagcccctgtgttagcttggaactccgtctcccgccgctcgccgctccgccgccgccgtcgcccgttgctcgccgccgccggggggggggggggggtcctcgtcatggacctcatctccgccatacccaccgccaccttctaactaaccagcgggagctgccagcgaagcgagagggcggcgccgcggcgagcagcggaagcctcgaggttagccatgtcttcttccccctcctgatttgcgccgtggccaggaagagggaaatccccccgaatcgaaacccccgcagtcggccgatgagcagctcgcgcaaatcaatcgcgtcgttgtttctctctgcagctgcctcgtagaaggaaggaaaggattgtgcagagtagctgcttgatcggttcatgtcagatttgggatgtggctgcatgagttttttctgctacgatttctgacatttctcaatgcagtgttgctgtttcaccagttgcagatttgtgatcccctcatggcacattgcagagaaaattgttgaaaagtaataagagtatgtttacattcacgtgtaatattgtcaagattcatttactaacgtatttcaagtttacatcagttcacttctgttccttctgattttctactttctggagcagactatattaaatggattttaccaacagatcacgagctggtcaaatcaggtttgcctggggtattcatcctgctggggctggagccactgaatcggccttgctgaattgaaatttgaaaaccaatcaagatcaccacacagttaagatggttatagtaattacaaagtcgcggctgttgcttgcttgtttcagttctatgacccattgcatatctacaagccattaatccagtacacgttattgactatctctatcgtgatcagttcaaccgaaaatatctggatagaactatctgatcatatagcactcctactccaaagaatacacaaaaagcaatcacaaagatgaccttgttgatgtactcttttgttgagtttggggaagacaaatctacttctgctacattgcaacggtgcaaaagtatcgggctgcatagctctgggtttccagcaaaactagaacttggaaatgtgctgaactggcctccaattggtacagacccttttagatcattgtgggaaacattgaattcagaaaggaagtgaaggttcaccagtgctggagggattgcacctgtcagatggttgtatgacaggtctagaaccatcagattcttgaggttgctgatcgattgtgggatctccctgtttaggttgttgaagctcaagttgagtgaaacgagtgctttcaactcaccaatctccatcgggatcgcaccagtgaatttgttattacctagattcaacattttagggaaagcagtaactgtacggtactgaaaacacagacatgcgcctgcatacactggaaacggaaaggctcttgggtctgagttatctgcaatcttatctgattttagcattggtatctccattagtgcttgtggtatttctcctgaaaggctattattggatatgtctgcatacttaaggaagtttaggctattgatccaggttggtataggtcccctgagtttattgttggataaatctaaaactgccaaatttccgagctttgagagccaactaggtatttttccagtcaatgcacaatcatgtatgctaataccaaaaatattctcgaaaccatcaattgtttcatcctgtggcatagcttcgtgcatgaagttgcccccaattaacaagacattgaggttccttaagctcttgagtatgtgaagagtatttttgatatttgtaaaattgttgtaggaaagagataagaaggtgatagaattcagattctgtatgttctttgtcaactggccgtgaagcctattggaagatagccgcaaccaagtcaaattactacatgagtatatgctttctggaattttgccggtgaagtgattcgaggcaaaatctaatgttttcagattgggtagattggagtagttaaccttggcaagctcacccgtcaacttgtttcccctgaggttgatggttactagttttgtgcaatctcccaatgatgatggcagctctccagataagttgttgctgcaaatgtgaagctcctttagtcttttcaactggcctatagaatttgggatcttgccactgaatctattccatccaagatcaacaaaaacaagattgatgagctttacgatgagagcatcatcaattgttccttgcaatccattgttagcgaaagagaggtactccaatgatgtggcattgaagagatcacctgggagaggccctctgatgttgttggcattagccttgagaagtctaagggcagaacatttacctattccaggggggatgttgccactgaactggttgtacccaagatcaagaacagcaaaagatggcgaattgctgcagaaggaggaaggtatgtgcccggtaaaactgttgttgctcgcgttgattgcgaccaggttcctcattttctcccatgtgatggatggaaattctcctgtaaaccggttgcttgagatattcagtacctgcagtggcctgtcagatactgatggattcaactcttgcaggtccccgttgaggcgattgaagctgacatcaaggacgacaatgctgccagaagacatcagctctgctggaaggccgccagatagggagttgtacgacaggttgaggcgcgacaagctggtgagctctcccagcgacggtgcgatttgcccttcaaggcctttagaggtgagacgaacctcaatgacagccccatcttcattgcaggtgatgccctcccacacacagcagttcgtgccattctgccatgacatggcgatgccaccgtcatgcgacagctcagcaaggaactggaggagagaactcttctcctgctcgacgcaagccatggcggaggtggccacgatgagaagcagcagcaataatgcagcagtagcgaggccagagtacggcatcgctagcctgcttctccacggagaatgtggtgtcatctgcatgaactctctcatcccagcaagtgtttggagttgaatgtggcaatctggcagctaaaatgctcgcgaaaacggcactgtttcaggagcataatgcacatggttgccttgttgacctagcgcgtttgagtctttgcgactggcatatttgagtgtacgtggtagtgatgtgccataccgctggcgctatctatcacattttgtggcctattgactaaatgagacagctggagtactcatgggccacactgctattctatcacactatttccgtttattgttttattctcgtttcagtttgtatagtagaggtccccgtcttcccagtttgtatagttctctgtcgttttactctgaaatttcaacgatttagtgtgaaatgtttcatgctaagaacgcaggttccgtctgatgtcgattccagtctagttcacatctgcttgcgatggcaatttatgtttgcaatgtgcattgctactttgcacaattgcatcccttatgttaagttcgaatttgtgcttagattaaccctgcgttttcacttaccttttcactttcaactttggcctctgaatattagtatataatcaattgttcggttagttgtctcgtatgaactggagcagcagaattttaacattgagatgattgaaatctgtggtttgttcggagaggacgctgtggtccctgtcagtcttcaccgcgcccccaggctgtgaccgctgcggccgtcgatctccactctagccagggaggaagagaccggtggagactggagagactcactaggtcccatatagttttttgtcacgttgatatatgtccatgagcaaaagtagcaaatactccactattttcgatttatgtaaatcactttgatttttttcaaagtcaaactttttagttcaattaagtttatagaaaaatataacaatatttttatataaaataaataaattaccaaaatatattcaatattgaatttaataaaactaatttaatgctatatttttctataaacttactcaaacttttaagaaaatagactttaaaaacttaaaacatgaaacacagaaaatagttaagaagtcatctattaagagggggaaaataagaccaaatctaaaaatggcatttgaataattacctttactaaaataattagagagtaaaatacatggccagttcttaaacttgagcagaggtgtcacattttgtgagttcggccaggggaaaaggctcgcctctggaagtcacgtatccgccccgaaagctaccagctagtgtgcacacaacaagattatacaggttcgggccgctatgaagtgtaataccctactcctgtgtatgggatttagactgaaagttacaaaggtccctaagctccagaaagcgctcttgcttcccttctcctagagcttaggttttctgagagtcgtcccttttctcggtgggcaaggtcctccttttatacctcaaggggataccacatgcaccgactctacctactcttctcttgggtgggggcccaccctaccttgaccggatctcgacccgtgccttcgcctggaagctaagccacggtttgtccttgagtggggcccagcgccgtcccatgcctgacacgggggacaaccctgtcattcccccattaatggatgaagaattgtggtggccgccctctcgtggggaggacttcgaatgacccctccgatgggacaggttatacctacctccactccgccaggggcagatgtgacgtgggggcacagctgtccgtccagtcagatgtgaccggcgacaggccggtcacagaccggtcattcctgaccgtcgcgcgccagtcgggcacgccgcacgtctgcccctactgcattgaatgcggcagggggcagttggggcgctgcgcgcattaaaggaggttcagcttgggccccctccccacttgctccccccgccagatggcggctgggcgaaggcctcggggcaaagcggtgcgagggcccgaggggcatgacgtggcaccccgaggcctcctggctgctcctgcgattcgcggggtgcgggggtagggccaagctgtagggtcgcgcggcaggatgggaaagtaaattcccctcacttcgcatacccccggtcccatatctccgacacacatagatccgtaaacttgatagttgcgcattgagatccatgatcttgttttaatacaccatagtcggtcaaaagtgcatttgaccaaaggtgaccatctacgtggcgctccacgcctccacgtaggtaacattttgcatcttgccccctccgcatcttgacatgacggtaattttgtacttacccccctattgctacagtaatcaccgaaatcccccaaatcttaatgagtgtcatgtactaaagcatcaaatcccccaaacttacttctagagttacctctctgactaacaattcttgtacatgtatgacaagagctctctagacgcttaacggcttaagtacttcagtaccatcaccgcaggatgaaaccgttgataattgattggtcaaaaactagcagtacaccatttctttgcgtggaaaaaagactagccgcagttttggcgtctccaaatgacacaattataatcaacctacacaatccacaatgccccatcgggacgttccagtagtggtctattggcaagtcaactgctcgatctccgttaccgtaagtaattctcttttgcagccgcccgtaatttttgaccttatcacattgacattgttacaacatgccttaatttacttgatcgggcatgacttctcttaccgccttcacgacggacctcttctcttcgcttgccattatttcggacaaagttttacttaaggtgttgaataaactaatgtataaaaggactaaaatactcttaagaggatattgtatagagaaaattccctatatacccctgacaatttactcaatcccttcaatacccctgaatttgacatcatcccttatatacccctgagttttcattttgatctcctctatacccatctccgttagttgacaattagttgaccgttaaatattttaaaatgactatattacccatcctatatatatgtggtacctacccaataaatattcatatgaaaaaattaacttatacaaaataaaagcaatataatcatttaatgcccaacttaaaaaataaaacttattattttttatttttaaaaaattatgattaaatccatacattagtttcaccagaaaattaagagcaaaaactaaatgttatttaggtttaaatttttgggaagatatacaaaattcatgaaatttgatcttaaatttatttaaaaattttaaatttgttttctaatttgtgataaactaattacatcccctttgttttttcacaatgaatcttttttcactaaatatttgttgaaaagtaattttcaaattttatgcagaactttttttacaataaatcttttttattttaatgaaataatgttttatttttaaaaattcataaaaaatatttagtaatttattccttattggttttcacaattcaaataatttacacataaaacatttctagcttttaacaatataccaaggacaataaagtaatttccacaataactaacggtcaaactaatggtcaattaacggaatgggtatgtaagggatccaaataaaaacttaggggtatataagagattaaacaaattacaggggcgtagaagggattgggtgaaattacatgggcatgtagggaattggccctattgtatatggagtatatagtaaatcaaggataaagatgtaattttccgttgcatatgaataaaaggaaccctccaaggacaagagagggggatctctcccccattccactcattctcatccttactcattcactctcatggtccccacgaggccaagcttaaggtttcctcccattggagggatgactcagccatgtatgttggattttgcaacaacaacaagggttgaagttgtgctgcatcgatttcctatgtttgagaaagaaaaacaattgctggattttgcaggattcacttggagagatagttcatagtactacatggaatcaaagcatcattcgaagaaagtggatatgatttacatcaatcatcatgcattggtgttgtggtcaaggtgagtggagggaccaaaactggtggagtggtgctctcttcttctggttgaaaggactggttaaaaggagggattgtgtgcagcagctgcttgactgattcattcacgccccattttttgagatttgggatgtgattacatgagctttgctagtgtctaacattgttgttttgaacattgtactcctgcgtttcataacataagtcgtttgattttttttttaagtcaaacttctttaaatttaactaaatttagaaaaatatactaatatttttaatataaaacaaacatattataaaaatatatttgatattaaatttaataaaattaatttggtattgcagatattgctagttttttttagaaaatttggtcaaatctactccagcgggagacggcctgctaaactttgaccaaaataaggccgggcccagttaaggtccaatctgccaggcaccctccctccccgcggccggcgccgccgccgccgccgccgcgccatgcccgccggtgctccccgactccggtcgccgaatcgagcccgctctcccgcccggcctgatccctcgcgctcaccgtagaatcatttccgcgccaatgcgcgatcttctgttcctgcctgccgctctaggataaccgtctccacttccatttgggaaaccctagaagtttatgcggatacggccgacggcctcggatgatccagtgatctgctgtccagaggtaaatcgagcaaatccatagccaagctcctatttctccaccaaagtttcagggaaaatcttgcaatttttcgcgacaaatttattgttaggttagctttagtttgctccacattttgcccttggatttcaaagcttaaacacagttgaaccgaactgaccaagatatagatcatctcggctttattaactgctgctgcagtagttatgtgctcactttgtaatccaaccatccaattgttcaattgctgctaattaaagtgccaatttttgcagaaataaaagactgaaggatttcggcctagctgttctgcatgcagaaaaccatatctgtagttttttcatgagagatccccagttattgctagtgtagtagtgttgattatattccatctgtaatataatttaccagaccaaaaaacattaactaccgaagtactagcattatttctgagggagcaaataacaagcctccttcaggaggcttttggaagaaattgataaaaaaaaacaaaccaaggtaaatactgaaaataaaattacaatgtgttccgacaagattgatttattgacacaactttggcgcttccgttcaaaagtcttacataagtgcattatgtaaattttatatctgcaaaaaggtggcttctcttaacacacaaacaccttccaatttaatctctctgcttatgtacttgaatgacaggtatgctgcattcagttattgctgttgattgatctggcttaagcttgggctataagaaatcatcagaccatggccggagatagtgacagctatcattgtgtcacaggtcttggttggtttgcgacctaactgaagtagagctagaaaaaccttgataggacaatctgatcatataacacccctacagcaaagaatgcaccaaaggaaatcataaagacaaatgatgatacaaccttgtcagcattttgttttgtggagacaaatggtgtttgtgctaaaccacaatggcgtgcaagcataggaccacacaactttgggttcccatcaaagctagtacttgggaatgtgctaagctgtcctgcatttggaactggcccttcaaggtcattgttagaaatgttgaatgctgaaaggaagtgaagtttgttcagcccatcaggaattgtaccagtgagattattgctggacaaatcaagcacctgtaggtttgtgagcttgtagattgattctggtatctctccagacaatctgttggaactcaaattgagtaactggagtgccttcaactgaccaatctcattcgggatgatgccagtgaaattattgatgcctagattcagcactttagggaatgcactgtttattcggtattgaagtgcataacctgtacagataggcagctcaaagacctttggtggaacattatctgattttagcattggcatctcaactaaggctgatggaatttcccctgaaaggctgttgtttgaaatgtctatatggaacaagaagtttaggctgctgatccagtcaggtattgctccgtttagttgattgttatataaagatagcatctccagatttgtgagctttgataaccatttaggtatttttccagacaatgaacaatcgttcagggaaaaaatccgaagattctcaaaaccataaatctcgtcatcctctggcatggtctcttgcatgaagttgtacccaataagcaaggtggtcaggttcctgcagctctgaagtatctgaagtgaacctgtgatatttgtaagagagatgtcaacaagtgatacaaatgagaggcacttcagattgcggattttctccgagagctggccatggaagctattgttagacagctgcaatgcacttagatttctgcatgagtagatgctttctggcactgttccggtgaaattgttcgacataagatctaaggactgtaaattgcgtaatgtggagaagttgacattgccaagatctcctgaaaagttgttgcccccgaggttcatgttcttaagatttctgcaatttcctacagttgatggcaactccccggacatgctgttgtatgccaaatggagcttctccagtctcttaagctgacctatcgaatttgggatacttccactaagcctgttttgtccaagatcaatggtcactagatttttaagcttggtgatgcctttgattgatccttctaactggtttctaagaaaacagaggtgcttcaaagaggtcagatcaaatagctcgtctggaagagtcccggtgaggttgttgtagctagcgctcagaagtgtcagcttggagcaattgctgagccccgcagggattcttccactgaattggttatagctgagttcaagcacagcaaaagatggcgcgctggcacagaacgaggttggcatctgcccagtaaatctgttgttgctggcattaagcacaaccagattgttcatcctctcccatgtggttgatggaaaattccctgtaaacaagttgctcgagatgttcaatacctgcagcggccggtcaggggttgaagatggcagctcactcagtcctcctgttaagtagttaaaactgacatcaaggaccacaatgctgctggatgacaccagttccagcggtaagccaccggacaacgagttgcgggacaagttcagcctcagtaaaccggtgaggtcgccgagggatggtgagatgctcccttcaaggcctcttgatgccagagagatcacctcgaccaccgctccgtttccgctgcaggtgatgccttcccaggtgcagcagtctgtgccgttttgccatgacacaccaaggccgccatcgttcgatagcccggagaggaactggaggagagattccctctcctgctcggtgcatgaaccggcatgacagacgaagcaaagcaggagtagcagcagagcttggccgaagggaggcatgcagaatctgctattatctcggttgctgcttgaagagagctgtcttggcattggcttcattattgctatttttcttgaaaactatcactggtttgtgggtttgattttgcaggataggcaggttagtgtgcaagtgcaaaacagcaaaagaataaagttcttgagcaaatatattgccgaatctttcagtcaaaaaaatatatattgccgaatctttccgtcaaaaaatatatgttgccgaatcagacacgaaggacagtaactcaagtagatgaggataaagatgaagattaagtgatttacgtaaaacaaggtggtattaatgtataattaattgagtttgaaaaatttatctgatattttagagtaacttacatatagaaagtttttgtacgaaatgtaccgtttagcagtttgaaaagcgtaccacggatatccaaattttcattcaacttttgttggagaaaagaacggggcttcttggaacaggatagatgagctattgttgacccaagacccatgcgtttacttgttgctgctacggtagttcggagaaattcttataacaaggaatcgtattcaaatacatgtaactaaggagtagttatcagtactaacttttcaaatacttcagtggaagcgtgtttgagggatgtcccggaaggatttgaacccgtttttgtctggctttggtcttatgcttaggtttatattactagtactaagtcgcactgtttgacaggaatggttgcacttgaaatggcttgagtagttgttgacttgttgttcatacacttggctttggctgcttgagtagttgttgttcatacacttggctttgactgcttgatgagagacaaataggagtgattccttgttcctttgagtacaatagatcatcaaaagtctgctatttttcttttagtgagtccttgttcctttgagtacaacagtacaccaagtctgctatttttcttttgatgatctattctactcgcctactcggatgtactatcagtggtcccgttcttttcttcaacaagagttggatgaagattaagattttcgtggcacgtttttcaaactgctaaacggtgtgtttcgtgcaaaaattttctatatgaaagttgctttaaaatatcatatcaatctatttttcacgtttgtaataattaaaactcaatcaatcatacgttaatattacctcgttttgcgtaaaaaacttaatcttcatctccatcttcattttcagaagaaaagagcaccaaagcagttgtgtttgactatcataccgctagtttggtgcgaaatgttgtgcttgcattgcatcagcttatcagtccggaaccaaaatttaaattttctctactatcataaaatgtagagtcgtcctccatccgtcctcttccacagcgtgcagcgaatccgcacgcgtagtgtatgtaatcgccgtatccaatattttatcatccaattatacttatagtctttctatttatatgggtctggctcgttataatataggagtatgttactagtaaaacttaattttagagttgattttatgttttttatcatagtttattttttagcatcaacttttaagtcgctaagaacatatgtataaaagttttgacctcaaattttttaggtccaataagcgttacactgaaacgatgtgtatgggaatgtgcatgggattcgatgatcttcccttgcacaattgctcctcattcagactttcggagtgggcacaccgatgaaagcatgactggctgcctttcagtgacaaatcactgaatgtttgaagattttcagcatttctccctttcacccgcaatcagcctttcctccaacaattgaactgaaatgcgtctactaggtgacaagcctcgacaagcacaaaaactgatctaacaccacccctactccaaacaagaggcccatctgtcttttgaacttggacaagtttcgatttttcaagaacatgaatcttttaaaaaaaaggtgaatattagggaatggcctaatatcaaataaatagaagcgttgaggctttgaacccataccagctagcccaccaacttgtgcagctagctggaaaacccctaggcatttctcacatggatcttttgatatggtggaaatctcttatgatgatcaatcatccacgccttaaacgtatcctaatgcctgaaagttggatagaccggagtgccacgacagtatggcggcccagtgaagttgtcatcagagatgaagctgacgaatgaactgaggtgcatctagccgagaaacctcgacaagcacaactgatctaacaacacccctactccaaagaaggcaccaaatgcaatcacaaagatgaccttgtaacctccttgtctgctggaaccttgaggtgaatctaccattactggatcatcacaatcttgatctagtatatggccgcatagcctcggatttccatcgaagctggatcttgggaatgtatccaggtgtcctccagttggaacaggcccttgcaagtcattgttggagacgttgagtgcagagaggaagttcaggttgttcaggtcagctggaattgtaccagtgagatggttgttggacaggtctagtatttccaggtttgtaagatcaaggattgtttctggaatctctccatgtaggttgttgtagcccagaatgagtgagagtagtgccttcaactgaccaatctctgttgggatcacacctgttaatttgttgttttccagaatcatcactgcagggaaatcactgacagtgaagtacttaggtgatggaccagtgtaaacaggcagctcaaagatctttatgtccaaatgagatgtaaccatttctgatcttagcattggcatctctgttaactctgctgggatttcccctgaaaggctgttgtttgataaatctagatagaatagggagtttaaggtgctgatccaaaccggtattgatccacttaaatgattgttaaacaagaatagcatctccagattcttgagttttgatatccaaataggtatatttccaaacagtggacagttttccatagcaagaaccttaagattctcaaaaccatcaactgttttgtcgtctgaaatttcctcatccctaaagttgcctccaataagcaaggtggtgagatctctagagctcttgaggatttgaagtgtatttgaaatatttgtaaaagagttttcagcaagtgataggtaggttagtgacttgaggttggttattctgaatgagagctgaccatggaacttgttaaacgatagttgcaatgcattcaggttgctacatgtgtagacactctcaggaattgtgccagcgaagctgttatatgagacatgcaaagattttagactagacagtttggagaagttgaccttgccaagctctccactgaagttgttgctcccaagatttaatgctttgagattcgtgcagctgcctatagctggtgtcagctcccctgccatgctgttgtggtgcaagtgaatctcctccagcctcttgagcttcccaatggaatcagggatgttgccactgaacatattgaatccaagatcaaggacaaccaaattcctgagcttgatcatgcctgcaccatcaagaactccctgtaaaccattgttaggaaaagagaggtgctccagcgaggtcacattgaagagttcatcagggagagtccctctgaggctgttgtggccagcctttagcaatcttaacgaagaacagttaccgatctccggcggcaaattgccactgaaatggttgtaagagagatcgagcatggcaaaggaggacgatctgatgcagaagaaggttggcatcggcccagtgaaactgttgttgctggcgttgagcacaaccagattctccatctcctcccatgagctgaacggaaaccgtcctgaaaacgagttgctggagacgttgatcacctgaatgcggcgaccggaagccgaagacgacggcgaatcttgcaggtctccattgaggaggttgaagctgatgtcaaggatgacgatgctgtctgacgacattatttctgcaggtaatccaccggacagtgagttgtgcgacaggttcagacgctgcaaacctggtagcctgccaagagcaggtgatatgctgccttcgagtttcttggaggccagcaagatgtctgtgattgtgacggccttgctggccgtgctgctgctgcaggtgatgccttcccatgagcagcagtctgtgccttgcggccacgatgcggcaaggccaccatggccgtcttgcgagagcccagccaagaactggaggagacagtttctctcatggtctgtgcagcagctgatggaagatgcagagaaaaggatcagcgcaagaacgaggcagagagtaggcatggtcaatttgttgtagttgctgctgctgctggatatgaagaaacttttggaattgatggaatgaaatgcatatggttgtctactgcaatcatcaagaagaacatgtgttcaagcttaaatgcttaggaaaaatatcaatcgagagaaacgagtaccagtcaagactcaagagtcctcacagacaaggtagcagtcaagagtcaagacttggatgctcctctggtcacatccatatgtggatctttcgcttaattcatcgtttcttttgtcttttccatcatttctctgctactgcaagaagaccagttttagttgcagtgaaatcaaagtgtgaatcagtggggagaaaacgatttcagtcgtctgattctgaaaatcataatggttcagttcagtacacccgtagcttgcagagattggattttaaactctcggatgtcccctcataatttgcatgtcacttaaataattgtgaaaagaatttaaaagtattgaaaatatgtattaacatgcgatatatcacttcacaaacatacaacttaaaattcaacttctacatgttgcaatgaaaaaaaaacaaattttaccacaggcatcaaatgccggtgccgacacaatcccgaagagaacagaagagaagagggtcccactcatcacaacattcaaaactggtcattatactgagaaggattatagttggcacggtattatggccgtgtttaattacaaaatttttcttcaaacttctaatttttccatcacatcaaaacttttctacacacacaaacttccaacttttccgtcacatcgttccaatttcaaccaaaatttcgattttggtgtaaactaaacacaacctatgagttgggagatgggctataacttgtatttaagttcatggatgaatttcagacttggcaataaatggagggagctaaagtgaacttatttcctgggcatttcgattcatatgcagcccatttcgatttcctggggcaatctattatctattgtattatcaaaggaatagaaaaaggagcctccacgttcgctctcatggtttagaaattctcacattaatcagagaaaaagaaaaaacagagtccatatagaaatacaatttagaaatagatgaaattcggaattaaaaataaggaatattagaagtagcgtatagagtccatatagaaatacaattaggaaataactgaaattcggaattaaaaataagaaatattagaagtagaatatagagtccatatagaaatacaattaggaaataatagaaatttggaattaaaaataaggaatattagaagtagagtatagagtccatatagaaatacaattaagaaataatagaaatttgaaattaaaaataaggaatattagaagtagagtatagagtccatatagaaatacaattaagaagataaatagaaattcgaaattaaaaaataaggaatattagaagtagagtacaaaatccatataggaatttaaaactaactaaaatttagaataaacataataaaattaaaagtagagtttagagtccgtataaaaatacaatttacaaataactaaaattcgaaattaagaaaaacatgataagaagagtttaaagtcaatataggaatacaatttagaagtaactgaaattcgaaattaaaaattaaagaatattagaagatgagtttagagtccacgtagaaatacaattagaaataataaaaattcagaaataaaaataaataatatttgtcgacgtttaatgtcgcgattccggtatttgcatagtatggggatcgttggtattaggatatatgcgagactgaggtaaaagagatggagacagggatttttatacaggttcgggcccctgaattgtcaggtaataaccctactcctgttggccaaagtcgttcgttgcttattcaccataatcacaccagtacaatatttggggtagcctatctaactgttgtcgacatggcggtctgaagtattatcacgtagtcgacaacagtgtagtcttcctcctcgagttcatgcccagcgagatcagagacagcgttagatccctacagccggcctccgtaggtaccggatagggtcggtccaggcatatctctgatgttgatatccggcgtcttgtcttggcgtatgttggcttgtgtcttgatctattgttccgtgtcccctcttctcctagggggccttgtatttatacacataggtgttcccttgtccaagtagaactagggagaccaatatggatataatccgagtagtccttgtcattttcatgtaaaactctggttgtcttttcttatccggaacttcatccatatccgaggtcagtgtccgtataatacatggtatgtggtgggtcttgtcgagatttagtcaactactattaggtatgtggtatccataaccctgacaatattggaagaagagcatagagtctatatagaaatacaatttacaaaaaattcaaaattaaaaaaaaagaaatattaaaagacgaatctatagcccatataggaatatatataatttacaaataactaaaattttatattgaaaataattaataactaacacgtatataaaatataataaaatataatattaatattacgcatcattagttttgtaaagttattgtaaaatttaaaattatgatgtcatttcaatgctaaccgcgcaatttgattgcgcgaaacatcatgctagttgagtattgaaagccgaaaggcccaaccagaaaacatttcccacaggcgtctgtctcctcctcctcctcgtcgtctccacggcgacagcgccgccgcttctcggtcgccggcgcacccgccgtctcttcggccggcgggggctctcgaggaaggcttccgcgccgccatcagtaccccgaatcgggtacgcacttcgcaacgcgcggccatctcttctctattactactcttccctgcgtgtgaatctgaacaggacgagttactcttattattattattatttcttatcggtttacctcaatcttttgtacaatgctgatgataataaaactagtagcacatgattctcaaattgtacatcctttctcaaagtacaaatgattttgacgaattcaagtactgaccatctttcagaatgctcattctgcacacctgagttgtgtcaactgaatgatggtctttaactaagtaggtaaatttattgacccaaatcatcttatgctcatatcataattgaagaaaccctagcctggatagtaacatctgatctaacagcacaccaagtgcaaagaacaagcccactgtgatgccaaagatgttgacactgaagttatctgtgtaaaatgcaggcgtgggaatagcttttgctgaattacactggcgactgatcataggaccacatagctttggattaccatcaaagcttgaattatcaaatgtatcgaactggcctccagttggaataggtccttccaggtcattgttggaaacattgaatgcagaaaggaagtgtagcttgctcagttgtaaagggattgtacctgttagattgttgttagacaagtctagcatctccaggtcggtgagcttgcaaattgcttgtgggatttccccagagaaactattgtagctcaaatcaagcatatcgagtgccttcagctgaccaatctctggagggatcacacctgtaaagccatttctgcctatatttagcgttgctggtcccatcagtaattgatgccttgaaccgctgcaaacaattattttagagaccctttcatttagaatggataccatcttctttgatttaagcactggcaactgtattaatgttgttagaatttcccctgtaaaattattatttgttatgtctagatggaagaggaagttgaggtttttgatccatacaggtactgatccagttaattggttgtcgtataaatgcaacttctccaaatttgtgagcttcgatagccagacaggcatttttccatacaacgaggacccacttattgagaaatgctgtagattttcaaaaccatcaattgtttcatcctctggcaatacctcattcttgaagttccctccaataagtagcatttttaagttcctgaaggtcttgaagatgtgaagtgcagttctgatattagtaaaagcattatcagcaactgataagaagacgagagacctcagtctgttcattgtctgtgagaactccccatgaaaattgttccttgcaattctcaggacaatcaaattggtgcatgcataaatgctttctggaactgtaccactgaagttgttcacaagaagatcaattgtcgttagattagataggctggaaaagtcgattttgccaaggtctccactgaggttattgaacttgaggtcaaggattttgagatttgtgcagttgcctagagttgatggcagctccccatacaacttgttctcacccaaacggagttccttcaatctcttgagctgacctatggatttgggtattttaccactaaacatattctgttcgagatcaaggattgacagtttgctgagttttataatattggcatcatcaagtactccattaagaaaattgtctgggaaagaaaggtactccaacgatgaagcgttgaatagttcatctgggagagcaccatggaagttgttgtgaccacccttgagcactctaagcgtggagcaattgcttatgtctaggggtatgctgccaccaaattgattgaaagagaggtcgagcacagcaaaggatggtgcattgatgcacaaagaactcagtatctgtcctacaaagctgttgttgctggcattaagagccaccagattgttcatcaccttccatgtggtggatggaaattgccctgcaaacaagttgcttgaaatgttcagtacctgcagaggccggatagttgtatgagctgagagctctttcaaagctccactcaagtgattgaagctgacatcaaggatgacgatgctgctcgacgacaccaactcctccaatggaagttcaccggacagcgaattgtgtgacaggttcaggtggagaaggccagtgaggttggcaaggtatggggagatttgcccttcaaggcccttagaagccagcgaaatttcggtgatcgttgcatctgtgccgcaggtgatcccttcccatgtgcagcaatccgtgtcattctgccatgacggcgaggccaccgtcctccgagaggccagcgaggaactggaggaggaagctcttctcctgatctgtgcaggagccggtggaagaggctaaacacagtagtagcacaacaacaaacccaagtaaatcggtgggtaatttgctgctgcttctgctgcatggaaactgggaaggtctcatgatggatcttttttttatcagattgagtatagtctggaactctggataaatcaatatgcagtagtgggcattataaggccagaaacttttttgggttgggagggaagtactcgtaccagagagggaggcagaaccgccgtcgagggagccctcgccggagccccgagacggggactgccgatcgctggtaaacgcacctatttgcgtgggccgaagcccagcctagtgggccaatcagtaaacctggttcaacttgcaaaggatggtaaaaataggtggtgtaaagtgaaaaaagtgacccacccctagcccaatgtgcaacttagatcaatataagtggtctaaagtgaaatttactctttatattatataagacactttgacttttttttcttaaactatttaaaatttgactaaatttatagaaacacaacaacatttttaacaccaaacaaatatggtataaaaatataccaaaaactaattggtgttataagagtagttatatttatatacctctataattttgatttagaaaaaaaataaaatgcttataatatgaagagggtgtagtgcttaggttccagaatccagctaggaactggagcaggtaccgaggcatcagcacaagaaatatggatagtttgtggctgctggactgctggtgctggatgaataattatttttcccctggaaaaggacattggtttggtcacatccatgtgattttttttttcaaaattgtactttactgcgtttaattttttttgggcgaaaactaacacggttgatatggattgtttttttttctctcttcaaaacagtactttattgcgcttgatttttttttggcaaaaactaacacggttaatatgatatggagtgcttgcggtggaatggaatgaccatggcgccacgctgggtgcagttgccatatttgttcgtagcggcttaaaagttaacgctaaaaaaactacattaaaaatatattaaaatgctttgcaaaaaaagattaaaattaagtttaaaattcaaatttaagattttgctttaacttattaggccaatgaggtgcgggctcaccggccgccggcgaagacaagagagtgctccacgagttcacggtaggacgatttacgtgcggcccatttttgttgggccgtaactggattgtaactagaatgcggcccataatagttggtccaggacgggatttcgattacgtgaggcccaaatatgggattagttgagtagggcaagggcccaagacttggcccaattgccacaggcaccgtctcgtcgtctccgtggcgacagcgccgccgctgctctgtcgccggcggccagcgcaaccgccgcctcttcggctcgccggcggcgcgcggggactcgaggaaggcctctgcgtcgccgtcactactacccatagctcgagtatgcaacgcgtggccatctccatctgctctctattactactattttcttagcgtgaatctgaaaattgaagcgatatagttgcagacgatggggattctcaaactatacatactagttctgatagagacaaatttgcacatgattttcacgaatttgagtagtgaccatcattcagaatgctcaatctgcacacctgagttgtggcagctagattcttgtcttcaactctgttcatagagttggaaaattaatatgccttgaagagatcttagcctttttagtaccatctgatctaatagcacaccataagcaaagaacaggccaaatgtgatgccaaagataaccttgtcaccgaattgatctgtggatgaagtagggctaggaagtgctcttgctgaattacagtggtgactgagcataccaccacatagctttggattaccagtgaagcttgagttgtcaaatgtatcaaactggcctccagttggaatagccccttccaggtcgttgttgtaaacattgaatgcagaaaggaagtttagcttgttcagttctaaagggattgtgcctgttagattgttgttagacaagtctagcatgaccagcttggtgaggttgcagattgcttgtggggtctccccagagaagctattgaagctcaagttgagcatatcgagtgccttcagctgactaatctctggcgggatcgcacctgtaaaaccatttttggctatgtttattgttgtgtggatatattggtattgtcggtttttgatgaatggaatgccgtaaaatctcatgtttgggacacttacatccagattggttctcttgtctgacttcagcattggaatctgcgttaatattgttggaaattcacctgtaaggttgttattggatatgtctagatagaagaggaagttgaggctgttgatccaggcaggcactgatccgcttaattgattattggataactgcagcaccttcaattttgtgagctttgatagccaaagagaaatttttccatgtaaagaagaaccacttatttctaggtactgaagattttcaaaaccatccattgtttcatctgctagcaatgtctcatggttgaagttccctccaagaagtagagtttttaagttgctaaagctcttgaggatgtaaagtgccttcgtgatattcgtaaaatcattccaaccaactgacaggcaggaaagagacctcagtctgtccattctgtgtgagaactcaccatggaatttgttccacgaaagtctcagtgcaatcaaatttgtgcaatcataaatgctttctggaattgtaccattgaagttgttcacgagaagatcaattatcattagattagataggctggaaaagttgatcttgccaaggtctccactgaggtagttgatcttgaggtcgaggattttgagatttgtgcagttgcctaaagttgatggcagctccccatacaagtagttctcacccaaatggagctccttcaatctcttgagctgacctatggacttgggtatgtttccactgaatatattctgttggagatcaaggatagacaatttgctgagctttataatgttggcatcatcaagtactccatttagatcattgtttgggaaagaaaggtgctccaatgatgaagcattgaatagttcatctgggagtggacccttgaagttgttgcggccacccttgagcactctaagcatggagcagttgcctatgtctgagggtatgctgccaccaaattgattggaagagaggtcaagtaccccgaaggatggtgagttgatgcacaaagaacttggtatctgtcctataaagctgttgttgctggcattaagagccaccagattgttcatcaccttacatgtggttgttggaaatttccctgtaaataagttgcttgagatgttcagtacctgaagaggccagatagttgattgaatgaagagctcttgcaaagctccactgaagtgattgaagctaacatcaagaacgacgatgctgctcgatgacaccaacccctccaatggaagttcaccagacagcgaattgtgtgaaagattgagctgcagcaggccggtgaggctgccaagagacggtgagatctgcccttcaagggccttagaagcgagcaaaatatcagcgatcctcatgtctgcattacaggtgatgccttcccatgtgcagcaatttgtgccgttccgccatgatgcggagaggccaccgtctcctgagaggccagcaaggaactggaggaggacactcttctcctggtctatgcaggagtcggtggaagaagctaaacacagcaccgtcagcagagcaaacccaagtaaatctgtgggtaatttgctgctgcttctgctgcatggaaactgggaaggtctcatgatggatcttttttttatcagattgagtatagtctggaactctggataaatcaatatgcagtagtgggcattataaggccagaaaaatctgaaaagagctgccgtgaagtctttgctgactgcagttactggctgagtggctggtcatcacaaagacaattcagaggtgaataagagccaccacctgcaatgcctttttgctatcaatggtccacggtcaattgttcatagattgagcagacagtaacaacatgaatcgcctgcagttctgcaaaacggtggcagagatgattactcaaatgcagcaggaaagtagggaaaatttcaatggtctagacgtgcatatcctggaacatatgaacaggatctttcaactgccatcaaggtcaaactgcacatttcgaccgtgtgagggagcctttctttcctagctgcttctggaggataagaagttgatagaagtatgaaaagtcctggtagcctcctgttgtcatctttaccggtcttcagccgtcaagactcgggaacaaatatcacctaagctcttctctcactttgcttttttccccttgtgttgattgaaggcgtaaaactgaaggtgctagcagcaaattttggtacatcgcatcttgtcagcaagcatgcagcttgaccgtttctttgcttttgctgttctacaacaaaagatacctcttgaaaggtgtacttaagtattgttataggtatttaggtggaaagagtaaaatgataaattaggccggagagagaaaatagtacaacagtcttgaaaatagcattagcatcagtaccgcatcggtacaactcccagtagcgattttctctactggcataaattacatgatcttcctttatttatattgtgttcctagatgagcataaaacttagtttggttctccgtcccctccatccccccccccctccccccccaaaaaaaaaagaccaatactatctacgaacttggacatatatgtatctaggttcgtagttagaaattcgttttttttgacagagtagtacctcattcaataatcttgtccactacattatttgtgttccaagagcatcatcagtaaaggtatcaccaatatttgtgtggttctttggagatttattctttttgaagatcatagtcagttaaaatatcattgatcctaagaaggagacccatcctgaatcagactcttatcggcactaatagatagcctttttatcacgtaaatgagtaaccaactacgtcactaatcagtacaaaacttaccgcctcccacttgtgacccaaggcggcgcttctccctgtaatatgcatccatcttatagaacacatcaaactctaggtaggagatgaagaagaagaagaacaggaaagaacgagtcacgaggaagaagaacgataaatgagagattggtcggattgatatcttttttctcctttttttgagaggaaaacttcatgtttccattaaaccatggacgcggcagaatcgccggcgaccaaaccctcaacacccggaggtgcaccgtccccaaagagatcggtgtttgggggactgttacatccgatcgatgctatagcatcagctaacttattacaatcacgcggacaaaagctaaacttgcaagtaagaaaagacgaggcgataatgttcttcgcttcaaacagaagagtccccaacggcgcaaactgaagatcttctcccttcagggcctgaataagcatcatagaatcagactccaaatgaatgtaagccatgcccaaactagtagcagctttgagccccttaactcccgccagcacttcagcatgaaaggcatcctggagccgtgacgaaaaacctgctcccgcctgtattacttgtgcttcagtatccctgatcacaaaaccccaacctcccttttgttcctgtggcttgaaggctccatccacattaattttcaggacatttccggtaggtctagcccattttctatttgatctagctgcttgaccactcccccgttgaggcgccaaatccttaaattcatctgcttgtttctgtatggagaaagccaggatattagctccccttcttccttctccctccctatgtatgtttctctcattccaccatgagtacagcagaacaatggcatgtatcctttgtttttcttccagctccagtatagcctgtaaaactgccaaagctgactgcaccgctgctaacttgcatcgtacttcttcaaggttgaggtctctccatatgtgtttgacctctttgcatttaaaaaagaaatggctcccgctaaagatcaagcatttggtatcaatatccattccccttctcttgagagtcatctggagggcaattgtgtcatgccccaatcgccacatgaagtgtttcatcttgttcggacagttaagcttccagagccttttccatacttgatcactttgtgcaccccccgacgaagatgcaggtgcacttctgctgtttcttctctcaatttctttctgcactttgtaggcagatttcatagaaaagaggcccctcttatcataatgccaccccactacatcatccctgtccacttgaaccggaattgacagaatggccttgacatcttcttcacagaaagtttgcctcaccagcatctcatcccaatcgcccgtataaggatctatcaattcatttactcttgttagcatgttcgtgcccttattagatacagtttttctcgtccagtctctagggatccaaggatcatcccaaatgccgatggaattgccattgcccactcgccaaatcatgccagcctaaagagtctgcagcccttttagtatgcttgaatgcttctccatgtatatgacatgcccgatcttggtttagcttgcagaattgatccagatggataatacttggccttcagaatctgagcacacagagaatcaggctcctgaagcagccgccagcattgctttgctagaatagccatattaaagacatatatatctctttttttctcctatataacaaagaagtattgatctaattatagatgtccataagttacttagttaactacttaacgccatcggttacgataatttattccataccttgcccatgtcattatcaacggttcatgttgccctaccttctaatacttctatgtaccttctacacacctcacaaacactataaaagatctctaagtaaaaatatcaatcgagagaaaggagtatcaatcaagactcaaagagtccttagagacaagggttgtgtttagtttcattcaaacttctaaaaattccgtcacatcaaatgtttagacatatgtatggagcattaaacctggacgaaaaaaaaaaccaattgcacagtttacatgtaaattgcaagacgaatcttttgagcctaattacgccatgatttgacaacgtggtgctatagtaaacatttgctaatgacggattaattaggcttaatagattagtctcgcaatttacaggcggaatctataatttgttttgttattagtctacgtttaatacttcaaatgtgtgtctgtatacttcaaaaaaaaattagctgtggaactaaacacgaccaaggtatcagtcaagactgcgatgctcctttggtcacatccatatggagcttaattggaaaattattctaaactctcaaggggctatcccttattgtttgtatgtcactcaaatggttataaattttttttaaaaaaaaatgaactagatggattaatatgtgctagatcaattaaaatttaacttctacatgatgcaatgaaaaaaaaatttgactgtgaatattaactagctgtagtttaatttgttttttgtttgaaatttatagaagttgaattttaacttgcatgtttgtagagtgatatattacacgttaacacatcttcttaattttttttatttttttcataactatttaagtgacatacaaataataaagagatatccccttagagtttaatccactctcgagcttaattcatcgtttccttcgtctttcccatcaattctctgccactgcaaggttctagatgcagtgaaatcaagtgtgaaaagtggggagaaaacgatatcagtcgtctgattctgaaaatcataatggaggtctgaatggtttttgtcacctgtagcttgcacggcacgaacgaacaattttgcctagcaaaagaatgtttccccctatggcaaatcagttggcaggtgaggtgagatgcagaaattcatcaattgtaagttgcattaataagtcatgcataaacgttgtcagttaagtatcactgagttttctactctaagtctgaactggatacagtcaaagtttacaaggaaacgtagcaacaggccattgactgaaacaattcaactacaactgatactaatcgagcaggccagaaaagagaagttgaaaaggttgctttctgactttgttcagatcagcacaccagaattctgcacctagtagtattagaaatgaacctaagctagtcaggtatagcagaatcctaagcttcagctagtcaggtatagcaaccagatgaaggccgagtttagttccaaaatttttcttcaaacttttaacttttccatcacatcaaaactttcctacacacaaacttccaactttttatcacatcgttccaatttcaattaaactttcaattttagcgtgaactaaacacacccgaagcaaaactccattgctaatctgacgaaattgttcagaaactccatttctcacacaagaacagcatgaccaagatgcaggaacttcaacttctcctagtccttgctgctcttgtgctgctctccttcctctctcctgccacctcctgcacggagcaggagaagagctcactcctccagttcctccgcgagctctcgccggattccagcagcaagttctcccggtcatggcagagcggcacaagctgctgcacgtgggaaggcatcgcctgcggcagcaatggcacggtgacggagctctcgctgccgtccatggcgctcgagggccccatctctgtatcaattgccaacctcaccggcttgcgccgcctcgacctgtcgtacaattctctctccggcgagctcccaccggagttgatctcctccgccagcgtcgccttcctcgacgtcagcttcaaccgcctcaacggcgagctgcaggaatcttcaccatcactgcctcaccatcctcttcaggttctgaacatctcccacaatttcttcgccggggagtttccgtccacgatatgggagaagaagagtgatcttgtcgcgatcaacgcgagccacaacactttcagtggcgcgctgccgtcttctttctgcatcagctcgccatccttcgctgttcttgatctctcatacaacctcttcagtggcagcattccagctgagataggtaagtgctcttcactcagagtgctcaaggctagcaacaacgagatcaatggcagcttgtcagatgagctctttgatgcttccatgttggagcacctctcttttctgaagaatggtttggaaggagagcttgatggtaaatgtagtttgtgaattttttctctggaagcttcaccccttcagtattgctatcgttatttacatatacatgagtagatgggcctctagctgatgggccagcacacaaacacacacacacacactattctatttacagcccaacactccccctcaagatgggtgatagatatctatcatacccatcttgtcacacgaacgattacactctttaacacctaaaccctttgttaaacaatcagcaacttgtccactagacgttacaaattctaattccaaaactccctcatccagtttttccttgataaagaaacgatccaactccacatgctttgttcgatcatgctgaactgggttgttagcaatgttgattgctgacttgttgtcacaccacaatttcatgggagtatccaccgacaactttaactcagaaagaagattccttagccataacaactcactcaaactcactgacattgcccgatattctgcctcagcagttgagcgagacaccaccggttgcttcttgctcctccaagatactaaattgccaccaacaaacacacaatagcctgaagttgatcttctatcatcaggacaacttgcccaatctgcatcacaatagccttcaacctccaagtgtccatttttcttaaaccataggcctttacctgggcttcccttcaaatatctcaagatcctatagaccgcatccatatgaccactccttggatcatgcatatatcgactcaccatactgacagcataagttatgtcaggtcgtgtatgacacaaatatatcagtcttcccaccaatctttggtatctttccttattcactggatttccagactctgcacataatttatgattttgatcaattggtgtagaggctgggcgacatccaagcatacctgtgtcactgagcaaatccaatgcatatttccgttgtgacagaactatccctctaggagatcttgcaatttcaatacccagaaaatatttcaactggcctaggtccttaacttcaaattctttgcttagattctgtttcaacctagtgatctccaagcaatcattcccagtgataatcatatcatcaacatagacagcaaggatggttatatgatctccactatgatgataaaaaactgtatgatctccattacattgcttatagtccatagcacacattgcacgcctaaaccgatcaaaccatgctcttggtgattgtttaagaccatacaaagatttcttcaatctcagcacctttccttcagtttgtgaagtagcaaatcccggtgggatatccatatacacctcttcttgaagatctccatgtaaaaatgcattcttgacatctagctgatgcaatggccaatcaaaattagctgcacaagatatgagagttcttaccgtgctcatctttgctactggtgcaaaagtttcatcataatcaattccatatgtttgactatatcccttagccaccagccttgctttgtatctttccacctttccattaggattttgctttactgtataaacccacttacagttgacaactttctttccttcaggaaatggtacaagatcccatgttttgttcttttcaagagcctctagttcatctaacatagcttgatgccaccttggatcttgctttgcttctctccaatcctttgggatttccattgaatctagtgatgctacaaaggctttatatgtggatgacaaggagtcataggaaacaaagttggatatattattttcttcatcaccctcatcttgatcttcaaaaccataccttagtggaggtttacctgcattgcttctcacactctttctgacagcaattggtaagtcagattcttctctaacttcctcttcttctccccctgactccaaagacccttgctcatgacttacatctttctctacctgattatcctcttcaacttgttggattactggacaccttgttctccttgtgtatacttgaagattttcctcttcatgtggcttcctccattcttgctcctgtgcaacaggaccacccataggatatggaattgaaccaaccacaaacttttccttctttgattgttcatctccctttggacccaatatttcaccttccatctgttgaccatcatgaccactagttgaattatcaagatcaacgaataaagaacttaaatctgtcttctcaccgtagaatgggacagattctctaaaagtaacatccatactaacaaaagttcgtcgttctgatggactccaacacttataccccttctggccagatggatagcctataaagatgcatttgacagcccgaggatcaagttttccaacggaaggtctatgatctctaacaaaacaagtgcaaccaaacacttttggtggaacaacaaattcattctttccaaatatcatctcacatggtgtctgcattccaagtatccttgatggcgtgcggttgataagataagttgctgtcattactgcctcactccacaagaatttaggtacattcatagcatacatcaatgagcgagctgtctccaaaagatgacggttttttctctcagccaccccattttgtggaggagtatcaggataagaagtttgatgcaatattccttctgatgaaagaaagctactaaattcattgtttatatactccccgccattatcagttttaataaactgaactcgagcattaaaatgatttttaatgtatgcatagaaattctggaagcatttaaacacctcatccttatgcctcataagatataaccatgtcatgcgagagtagcaatcaataaaggtaacaaaatacttcattccactcatagagaccataggtgaagtccaaacatctgagtgaattagcataaatggtaacatacttcggagtcctctactcacatatgatgttcttgtatgttttccatactcacatgcatcacatactaacttatgtttatccactctacttagttctgctggaaacatcttgctcatagtttcaaaagatatatgccccaatcgacaatgcaaaagtaataccttagcctcttctttacttgtagaagccatcaatgcaagacatacatcttcacttgtctcctttcgatccaaataccaaagtccatcacgcctgatgccagtcccaagtttcttccctgtttgcctctcctgaattaaacaattctcacgatcaagggatacccgacaatccatatgatcaacaagagaacttattgaaatcaaattcactggaaaagaagggatatataacactgatgataaagtgattgaaggagtacattgtactgttccctctcccttaactgggcatgatgttccatcagcagtttcaattgtttcttttcgtgtaaatgggtatggtttatatgatgcaaattctccacacatacccgtgacatgtctggatgcacccgagtcaagtatccaatttgaatgagaactattgattgacataaatgcttggtttgagttacctgagatagaatgaacaaggttggcaacatcaacatttgtaggtccagaacaaccctcttcaagagtgaccacattagctctgtgatcacctctatactcatagcctctacctctgttagctctacctgcataacctcttccacctcttgctccacctctatcaccacttcttcctcttccataactaggcttgcgaggagcacgacaatcacgcatgagatgccccatttcaccacaattaaaacactctctagtctctttaccttgtagcattgcataggtgggacttgatgaaggtggtgtagccttaggcaatactttcctcttaagctcatcttgagccatagctgctatagcctcatccaaggtaggaagagtagtctgatggaacatagcatcttttctcccttcaaactctggatttaggcctttcaagaattcaataacccttctgcgctcaatccatttcctcatttttgctatacaatcggggtgctctaacccaagaggatcataatgatccaaatcagaccatagatgcttcaattctgcaacatattctgcaatagaacgctccccctgtctcaaagcacttatcttctcccgtgcctccaccattagcatcacatttccttctcctgagtagagattagtgagagttttccacatctcacttgcacttgagatggtctcaacagttgtagcaatagcagggataagtgaagtcaacaaccatgctactactaaagagttggtagtgctccaagtcctccattctgcactagcactctcaggctccttcacttctccggtgacatatccttctaatcccttagtcttcaaaatcaacaatgctctccttgaccaacttaaataatttttgacaccctccaacttaatatcattttgcatcaagtcaattttttgcattgtttcagtatgaggaatcactgcattacttgtagttggggcctcactaaatttctttgcaagcatgtccaccaatttacccatcacttgttcaagtccctgattttcccccattttaatcaagcagcactcaactaactgctgtaacaaagcaaactctccttgtctacactccaccagcagcactaacaacaagccaacaattcctctaccctgtattttcttcccagtaaatcagtagtagcagcaagaacaatctcgattacctcaatcttgaagaagaacaacagtaacaacagtcactagtgcttcttccctcaaccacaagccacagtacagagtccaccaccagccaacaagcagaagcacggctgggaaccaactcaacaagcagaagcacggctggggaacccacttgtagctgctgcccctccagacctccctgctcagctcacgcacctgctgtgtgttgccgtcaccgccgctcgctgcagcagccgcgagcgtcctgacctgctgcgcctccagtccactcctacttgtccctgctcaccgtcctacaccaccaccaagaactccaacctcagcgcttgctccctcagctagggttcgtcgccgccggccgccaggagcacggctctgataccatgtagtttgtgaattttttctctggaagcttcaccccttcagtattgctatcgttatttacatatacatgagtagatgggcctctagctgatgggccagcacacaaacacacacacacactattctatttacagcccaacagtaaacagatagccaagctcaagaatatagtagttcttgatcttggatcgaacaatttcatcggcgatattccgggtagcataggtcagcttaagagattggaggagctccatttggactacaacaggatgtccggggaattgccatcagctctagggaactgtacaaatctcaagatcatcaacctcaagtacaacagcttcagaggagagcttctgaaggtgaacttctccggacttcccaatctgaaagttttggatcttgagtcaaacaagttcagtggagaaattccggaaagcgtctaccatgcagcaatctgacctcgctgaaactatcttcaaacaaattctatggacagttgtcaccaagaattggcaacctgaaatccctcttgttcctatcactttccaacaatgcttttgtgaatattgcaaatgtgattcatgcactcaagaactccaggaaaatcaacactttgatcataggaaccaacttcaagggtgagaccatgccagaggatataccaatcactgatggttttcagagtcttcaggttctttccataccatcttgctcattgtctggaaaaattcctctttggctatcaaaattggccaagctggaagttctggatctgtccaacaatcaactcactggaccaataccagactggatccatgacctgaacttcctctacttcatagatatatcaaacaacaaacttacaggggatctcccaacggcaataatgttgatgccaatgcttcaacctgacaaggttgcaacccaattggatcccagggcatttgaacagcctgtctatgcagggccatcacttacatatggcaagaacaatgctctccctgcaatgctgaatcttgcaaacaacgagcttaccggtgcgatcccttcagaggttggtcagctgaaatcactcacattgctcaacttgagcttcaacagcttgtcaggacagattccacagcaacttttcgacctgacaaacctgcaggtggtagacttgtccaacaaccatctctcaggttcaattccaccggggctgaataacctgcacttccttacaacatttgatgcttctaacaacgacttagaggggtggattccagctggtgtccagtcttcatatccgtatgatttttctggcaacccaaagctgtgtgatcctacactcactcgcacctgtgattcagcagaggcacctccagtctccacgctcaccggagaagaaaccactccaaagatcgtctttgcaatcgctttcggtgcgttcttctgtttaggtgtggtgtatgatcaggcagtattatcgaggttttttggctagttctattgcagttttcatgtgtttttttttataaaaaaattggtcagtttggtgtttggacagagctattcaggtccaagcggacacgtccactgaacaagttgtgtgtactgtagttgcgagtgaaatatagcttttgttcatgtttcccagtggaggaatattttagttattttccactcttctcgaaatgtcacttttcccactgggcattgtggcgcaggtaacaataattaccaagttgtagtgctactgccggtaggaaagaaataaaatacaatatatgtacagtgatttcaggcacatgcactaaaataatagagtagcagttatagctgttacatttgtagccattgtaatcttgttacagcaacgctgcagcttcatcctctacaaatagaaacacaactcagttttgcatttcatcaaacaagatggatccccctaatagagattttatgcacgtgcttagccagggctctccaagccaaacttgaaatggtagccaaaactccacttctcctcaattttctcccaaacatagtttgctcgatcctcaacacccacttttcagaacttctatacttttggggctctaaccaactatcaactatatgacaattctactccaagcttccactgtttaccgagagaaactttctttcaatttgccactttccccgatgcggcttaccagccatcgacgtaaccatcgttgagacaaaagtagcagacgtggatccacgtggatctttcgcttatactaggttcatttttagatccttttatttatttaaaataagtttatttttaaaataatcttcgtatcggagtttgtgaaagtagaagtagataaagtgaataataattatattggggtttgataaagtagttatattctagtttttatggctttgtagtggtacgtgtggccatgtgggatgagtgaaaaataaatttattttggaactgatgtagtactacttcattgtttcctttgtctctcccatcaattctctgctagtgcaagaagaccaattctagctgcagtgaaatcaagcagggccggtcctgacatttgggaggccctaggcgaacttgacactatgggcccttataggaagttaaggctatttttttttacttctaatatatatactctataaagcatataccatagagtgacacaaataaacatttctaatatgataaataatcaatcaagtagtttgcaagttgcaatagagcaatttattctcgatgaataatatcgatagtataattgacaactaaaaaaacacaattgaaacaaatgagtatgaataccttaataggagacaacaaatatcctatgtcccttataaaaaagagtttcttctcgcatttcttgaagcgaaatcaataatgacagtttgaagatcaatgtcgtgcaagatattcttctcaatctgcagatagccaagccattcaaccttccatgtgacatagttgaccttaaatagtttttcaataattgatattcccgttttctttttgtttcttttctgagcacccgacaaatgtttttaggtaacattataacacctgaaatagggaaattgcaaagcaaattatatctatacaacaataactatgaattgaaattaattgataaaggcatagttcaatgacctaccttagtgctggggaggagaggcaaacaattgatgacgaattgacgatcagtcgatcacgtcgatcacaggaggaatcactcaggcggacccagacaggcagccatgcaccacagcggttggctgggccggccgccagcgatggcgaggcgagcaatcaggcaacggcgcacaggcagtcaggcactccatctcccggtctccgtctctgaagtctgatcactcggcttggtttttggctttcacggtcgcggacgcggactgtctagggcatcggcggcgattcgggatttcagggcgacgaagcgacgcggctcggcctcgatctccgcctctccggtctcgcgagtcgcagccgcgggcagatcgaagcgacgcacaaccacactcgcgcacgcgcgctgatcgctggactctgttgggcctaccgcctgtggtgctgggctgggataggggggcaggggggtaagtgatgggcccccctccggcctgggctctaggcggccgcacaaccggcctacccctagggccggccctgaaatcaagtgtcgaacacaaacagtggggagagaatgatattggtcgtctgattcagacactttgtgtaggtttatacttactggcttagacttttaagtcagtttattggtttatatgatttgtaagtcggtggatttaatatcctaagtttagtgatggagttatacatatatctcacataaaccaaaaaagcttctctaacctagtttttggcttaatagtgttagtgtggcttatagctttaaaaaagtcaaactgaaaaagatgcttgtttgtttaggcttagacttttatgcttataagttggcttataagcctaaacaaagagggcctgaatggttcagtcacccgcagcttgcgtttgcacgacacgaacgaacaattttgcctaacaaagattgttttggccgatccatgcgtgtatggcaggcaaagggtctctttgggaaagcttaagattctgagaagcaactagatgatagccagcttagaatctggaaaagctaggtttctcggcttttggcttctagttcattttctggattctagaactacagcttctcagaatctggacaaaaattaaactgtttggtggagtttctgattctaggagaagttgtagcagcgaagctcccccatacaggcccaaaatcagtactcgcagagggacggttattgggccggaacgggagtgcaactcacgtgcggcccatactagttgaacctcaacggggttctcgtctaggtgcggcccaagaaaggattctgacgtacggcccatgagtttttggaccaaaattttgtgtggcccaagaaagttaatgggcctggcagaccaagaaagtgtgtgggcctgaacccttcggaacccaaacattccttggccacatcgccgtctcgtctagtctccacggcgacggcgccgccgcttctcggtcgccggcgcacccgccgcctcttttcggctcgccggcggcgcgtagggactcgaggaaatgcttctgcgtcgccatcactacccgaatcaagtacgcaaagtgcggccatcatttctctcttatttactactctctttttctgtcgtgaatctgaacgttaagagagattttttttcttcttcttttactgtacctgaatatttgtgaatgctgatgattgatactacttgcgcacgattctcaaagtgtacatactagttctagcagtggcaaatttacacggaattttgatggatttgagtagtgaccatcatccggaatgttcattctgctgaacacctgcaaagagttgtcacaactggatgctgttcttgaactctgtagtctgttcatgtagtttggaagatgtggtttttcatggacggttgaccaaaattagctcatgctcatctcagaattgaagaaatcttagcttggaaagtaccatctgatctaacagcacaccaagtgcaaagaacaggcctactgtgataccaaagataaccttgtcactgaattcacctgtggatagagtagaggcaggcgcaggaactgcttttgctgaactacaacggtgactgagcataggaccacatagctttggattaccaatgaagcaatctgtgaatgtgctaagctggccttcagttgggataggcccttctaggtcattgtaagaaatgttgaatctggttaggaagtttagatttttcagtgctgctgggattgtaccagatagtttgttgcttgataaatccagtgttagcagatttgtgaggttgcagatcgactgggggatatctccatataatttgttagcgctcaaattgagttcaaggagccctttcaactgaccaatctctggagggatcaaaccagtgaatttattgctgcctagatccagcattatggggaaagcattggccttgcggtattgaagtagtgatgtaagactatatatgggtagttgaaatgctctagggtgcaattggacttggactgcagacttctctgacctaagcattggcatctgtactaaggctgttggaatttctcccgtcagattgttgtttgatatgtctagatagaagaggaagtttaggctgctgatccagtcaggtattggtccagttaattgatttctatttaatattagcatctccagactcgagagttttgataaccatcgaggtatttttccatatataaggagcaagcaatttgggaaagaacctgaagattgtcaaatccatcaatgttatcatcgtccagtattctctcattcatgaagtttcggccaataagaagggtggtgaggctgctggagctccttaatatctgtagtgcatttgttatgtttgtaagattgttgtaactgagtgacaggaaggaaagggatttcagattacctagtccctttgataactggccttgaaacttattggaagatagccgcagggcagttaggttactacatgagtatattgtttctggaatcttaccactgaagttgttccacaaaagatctaaagcttttagattgggtaggttggagaaattgacattgacgagctccccactgaaattgttgctcctgaggttgatggttatcagacttgtgcagttgcttaaggttgatggtatgcccccatacattttgttgttgttcaaaaggagttcttccaatctgttgagctggcctatagactctggaatgttaccactgaagttgttctctccgaggtcaagagtagccagcttccctagtttgataacattttccccttcaagtgttccatgtaaattgtcgtttggaaaagagaggcactctattgaagtactcagcattgaagagttcgtctggaatagtcccacaaaggttgttgtggccaaccttgaggactctgagcctggagcaatttccaagtccagggggaatgctcccactgaattggttgtaactgagttcaagcacagctaaggatggcaagttggtgcagaaattagttggtatatgcccactaaatctattgttgctagcactgagcgtgatgagatgcgccattccgtctaacgacggcaactccgtggaaaacttgttgctcgagatgttgagcacctgcagaggcaactttagaccagtggttagtggtggcgacagtggtagaattctgccgaggctgttgaagctgacgtcaaggatgatgatgctgcctgatgacattacttctgatggtaatccgccggatagtgagttgtgcgacaggttcagacgcagcaaacctggcagtctgccaagagcaggtgatatgctgccttccagcctcttggaggccaacaagacgtctgtgaccatggcgtccttgctgaccatgctgctgcaggtgatgccttcccatgagcagcagtctgtgcccagccgccatgacgcggcgaggccaccgtcctgcgagagccctgctaggaactggaggaggcagttgttctcacgctctgtgcagcagctggtggaagatgcagaggaaagcatcagcacaagaacgaggcagagaatagacatgggtaatttgtttttattgctgctgctactggttgtggtggtggtgggtgatgaaaatttgaaactaatggagtgaccatatataatgttgctattctgaatttgtgattttcctcaattcagtcggtacatattaattgagagagagaggaataaagcagcaacttggtacagattgcttgattgtcttctagagctagggaccgcagggacaaaaatatcagtccttggatgcttttttcgtgaaacacggcttaatgttaacccaaatcaagtagcagtacaaccgtttctgtctttcagatcaattccctgtgaatgcatggcaacctgctctggttgcagtgaaattaaagtgtgaaaaactgaggagaaaacgatatctgttgtcagattctgaaatttataatggaggtctgaatgattcagttacctgtaagttgcacggccggaagaatgaatgctacggggtggcatccaatccatgcatgttcggaagatcaatcggcaagtaaggtgaggctgctgtctcagaattgaagaaatcttagcttggatagtactatctgatctaacagcacaccaagtgcaaagaacaggccaaatgcgacgccaaagataaccttgtcactgaattgatctgtggaaagagtggaggcaggagcatgaactgcttttgctgaattacagtggtgactgagcataccaccacatagctttggattaccaatgaagcttgagttgtcaaatgtatcaaactggcctccagttggaataggtccttccaggtcattgttagaaacattgaaggcagaaaggaagtgcagcttgttcagttccaaagggattgcacccattagattgttgctagacaagtctagcatctccaggttggtgaggttgcaaattgcttgtgggatctctccagagaagctattgaagctcaaatcaagcatatcgagtgccttcagccgaccaatctctggagggatcacacttgtaaagccatttctagctacatttacttctgctcggaggatgcgatattcatatttccaatctttaagtgcaggtaagtccttttttgaggacatatatgtcggtaatattaagacccttgcatcaatattggccactgtcttctctgatttaagcattggcatctgtattaatgtcatcaatatttcccctgtaaagctattatttgatatatctagacagatgagaaagttgagtttgttgatccatacaggtaccgttcctgttaatcgattgtcatataaaaacaacttctccaaatttttgagcttcgatagccagacaggcatttttccagataacgaggacccatatatttcaagatgttgtaggctttcaaaaccatcaattgtttcatcctctggcaagatctcatgcatgaagttctgttcaatagatagcaccgttaagtttctaaagctcttgaagatgtgaagcgcatttctgatattagcaaaagcattaccaccaactgataggaaggaaagagacctcagtctgtccattctctgtgagaactcaccatggaatttgttccatgaaagtctcagtgcaatcaaatttgtgcagtcataaatgctttctggaattgtaccattgaagttgttcacgagaagatcaattatcattagattagataggctggaaaagttgatcttgccaaggtctccactgaggtagttgatcttgaggtcgaggattttgagatttgtgcagttgcctaaagttaatggcagctctccatacatattgttgtggcccaaatggagttcctccaatctcttgagctgacctatcgagttgggtattttgccaataaacatattcctttcgagatctaggattgacaattttctgagttttatgatattggcatcatcaagtactccatttagaacattgtctgggaaagaaaggtactccaacgatgaagcattgaatagttcatctgggagagcaccatggaagttgttgtggccacccttgagaactctaagcatcgagcaattgcctatgtcctggggtacgctaccgccaaatcgattgaaagagaggtcaagctcagtgatggatggtgcactgatgcagaaagaacttggtgcctgtcccgtaaagctgttgttactggcattcagagccaccagattgttcatcaccttccatgtgtttgttggaaattgtgctgtaaataagttgctcgagatgttgagtacctgcagaggccggatagttgtttcacttatttgagctgagaactcctgcagagctccacttaagtgattgaagctgatgtcaaggatgacgaggctggttgacgacaccaactcctccaatggaagttcaccggagagcaaattgtgggacaggttgaggcgcatcaggccggtgaggttgccaaggtatggtgagatgtgcccttcaaggcccttagaaaccagcgaaatttcggtgatcgttgcatctgtgccgcaggtgatcccttcccatgtgcagcaatccgtgtcattctgccatgacacggcgaggccaccgtcctccgagaggccggcaaggaactggaggaagaagctcttctcatgatctttgcaggagctggtggaagaggctaaactcagtaatagcacaacagcaaacccaagtaaatccatgggaaatttgctgctgcttctgctgcatggaaactgggaaggtctcatggtggatttttttttcttctcagaatgggtacagtttggatagatcactatgcagtagtattatattgagtaaagatactttagaggtgaataatagccacagcctgcaatgcccatttgctaccgatggttagtttcagaagaactttgctaccgatggtccttgttcattgattgcgcagaaagtaataccgatgactatgttatcccgtgcctgtccaattgttgcattggttcagacaactgtgacgaccgctgtttcaagcttgacaattgacaaaactatgaaaaatcctggtcgcctcctgctgtcatctttgcctgtcttcagccgccaacactgcagcaatatcagctaagttcttctctttgtttgtttccattttttcccctcgctttgattgatggtgtaaaattgaaggtgctagcaacaaattttggtacctcacaccccatcagcaactaagttgcttgaccatttctttgttgctgctgctctttgctcgaccttcctggccaaagaaaagctattttcttttgcaaccattcttagttaaatccttgtcacattgacatttttacatcatcctgatgacttctcttggctcttgcagcttcagatgatagacgtgcttgcttgccaccaaaaaggagaaatgcaagcatatgtttcatgaaacagcctgagctcaattgaccaaaggctgaagcaacatgctaggggaaaaaaacagttgttatgttttttatccattcagttaaaacttataagtagtaagcacaagagaggcagcaaggccagcaaaattcagatgactactcagatgcagcatgaaagtggagtacatatcctgacctggaacatatggacaggatatcaggatcttaaactgccttcatgatccagtccattttgactgtgcgcaagagccctttcttggctagctgcttctcccaattgatttttgagtgtcccaacatgcactgttttacaacgatctacgttgagcaatgaatgttttacaaataagttcacatcggaatatactttgttcctattattattgcttattactctctttgttttatattagagtaaatttcatcttgaaccacctatattgaccaatgtggcataatgggctagggctaagtttctcttttcacttaacaccacctaattttacaatctttttcaagttggaccaagtttacggcatgggctgcgtttcggcctaatccacgcgagcagctggtgtttgctcatggtggcagtggtgcgcgataccaggagcgtgcgcgacgcgttggtgtggtcatcggcgagggcgagcatgtcgtcgtccagtggacacggactctgtggtgataacgctcggccctgtcgcgctcaaaacaatactacggcacatctgattacgttgacaggatctgagaccataccagaactatcccattcagatcatgcatgtgaatcaagatccgatcttctctttaattttcttgtgaaaattcgacatgtttccggttaccaaccgaggaacacggattaattactctagttttttcgaagagcagcagaggaatattgattacccccacaaaacccaaatctcataggaattactgaatgcattgctttgtttcactctcccaagccccagggtcaaaactttcctccatggattgctccatgatcgaatcgcagatgcatatacctgtctacctcataaacccaacaagcatcctagcaacgaggcagccgacgaccccagtgattccatcctcgggaagccatcgatcgaggtggcatgggcgtccaccaggcagaggccctttggcctgacgctggcgacacggttggatgacgagacttgctccaccttggcgccggtggacggtggacacggtggcgtttgtgtttcgattgttgagttcacgccgctgcacagcagccgtgtgtgaacagagacttttttgggttgggaaggaagtactcgtaccagagagggaggcagaaccgccgtcgagggagccctcgccggagccccgagacggggactgccgaccgctggtaaacgcacctatttgcgtgggccgaagcccagcctagtgggccaatcagtaaacctggttcaacttgcaaaggatggtaaaaataggtggtgtaaagtgaaaaaagtgacccacccctatcccaatgtgcaacttaggtcaatataagtggtctaaagtgaaatttactctttatattatataagacactttgacttttttttcttaaactatttaaaatttgactaaatttatagaaacacaacaacatttttaacaccaaacaaatatggtataaaaatataccaaaaactaattggtgttataagagtagttatatttatatacctctataattttgatttagaaaaaaaataaaatgcttataatatgaagagggtgtagtgcttaggttccagaatccagctaggaactggagcaggtaccgaggcatcagcacaagaaatatggatagtttgtggctgctggactgctggtgctggatgaataattatttttcccctggaaaaggacattggtttggtcacatccatgtgattttttttttcaaaattgtactttactgcgtttaattttttttgggcgaaaactaacacggttgatatggattgtttttttttctctcttcaaaacagtactttattgcgcttgatttttttttggcaaaaactaacacggttaatatgatatggagtgcttgcggtggaatggaatgaccatggcgccacgctgggtgcagttgccatatttgttcgtagcggcttaaaagttaacgctaaaaaaactacattaaaaatatattaaaatgctttgcaaaaaaagattaaaattaagtttaaaattcaaatttaagattttgctttaacttattaggccaatgaggtgcgggctcaccggccgccggcgaagacaagagagtgctccacgagttcacggtaggacgatttacgtgcggcccatttttgttgggccgtaactggattgtaactagaatgcggcccataatagttggtccaggacgggatttcgattacgtgaggcccaaatatgggattagttgagtagggcaagggcccaagacttggcccaattgccacaggcaccgtctcgtcgtctccgtggcgacagcgccgccgctgctctgtcgccggcggccagcgcaaccgccgcctcttcggctcgccggcggcgcgcggggactcgaggaaggcctctgcgtcgccgtcactactacccatagctcgagtatgcaacgcgtggccatctccatctgctctctattactactattttcttagcgtgaatctgaaaattgaagcgatatagttgcagacgatggggattctcaaactatacatactagttctgatagagacaaatttgcacatgattttcacgaatttgagtagtgaccatcattcagaatgctcaatctgcacacctgagttgtggcagctagattcttgtcttcaactctgttcatagagttggaaaattaatatgccttgaagagatcttagcctttttagtaccatctgatctaatagcacaccataagcaaagaacaggccaaatgtgatgccaaagataaccttgtcaccgaattgatctgtggatgaagtagggctaggaagtgctcttgctgaattacagtggtgactgagcataccaccacatagctttggattaccagtgaagcttgagttgtcaaatgtatcaaactggcctccagttggaatagccccttccaggtcgttgttgtaaacattgaatgcagaaaggaagtttagcttgttcagttctaaagggattgtgcctgttagattgttgttagacaagtctagcatgaccagcttggtgaggttgcagattgcttgtggggtctccccagagaagctattgaagctcaagttgagcatatcgagtgccttcagctgactaatctctggcgggatcgcacctgtaaaaccatttttggctatgtttattgttgtgtggatatattggtattgtcggtttttgatgaatggaatgccgtaaaatctcatgtttgggacacttacatccagattggttctcttgtctgacttcagcattggaatctgcgttaatattgttggaaattcacctgtaaggttgttattggatatgtctagatagaagaggaagttgaggctgttgatccaggcaggcactgatccgcttaattgattattggataactgcagcaccttcaattttgtgagctttgatagccaaagagaaatttttccatgtaaagaagaaccacttatttctaggtactgaagattttcaaaaccatccattgtttcatctgctagcaatgtctcatggttgaagttccctccaagaagtagagtttttaagttgctaaagctcttgaggatgtaaagtgccttcgtgatattcgtaaaatcattccaaccaactgacaggcaggaaagagacctcagtctgtccattctgtgtgagaactcaccatggaatttgttccacgaaagtctcagtgcaatcaaatttgtgcaatcataaatgctttctggaattgtaccattgaagttgttcacgagaagatcaattatcattagattagataggctggaaaagttgatcttgccaaggtctccactgaggtagttgatcttgaggtcgaggattttgagatttgtgcagttgcctaaagttgatggcagctccccatacaagtagttctcacccaaatggagctccttcaatctcttgagctgacctatggacttgggtatgtttccactgaatatattctgttggagatcaaggatagacaatttgctgagctttataatgttggcatcatcaagtactccatttagatcattgtttgggaaagaaaggtgctccaatgatgaagcattgaatagttcatctgggagtggacccttgaagttgttgcggccacccttgagcactctaagcatggagcagttgcctatgtctgagggtatgctgccaccaaattgattggaagagaggtcaagtaccccgaaggatggtgagttgatgcacaaagaacttggtatctgtcctataaagctgttgttgctggcattaagagccaccagattgttcatcaccttacatgtggttgttggaaatttccctgtaaataagttgcttgagatgttcagtacctgaagaggccagatagttgattgaatgaagagctcttgcaaagctccactgaagtgattgaagctaacatcaagaacgacgatgctgctcgatgacaccaacccctccaatggaagttcaccagacagcgaattgtgtgaaagattgagctgcagcaggccggtgaggctgccaagagacggtgagatctgcccttcaagggccttagaagcgagcaaaatatcagcgatcctcatgtctgcattacaggtgatgccttcccatgtgcagcaatttgtgccgttccgccatgatgcggagaggccaccgtctcctgagaggccagcaaggaactggaggaggacactcttctcctggtctatgcaggagtcggtggaagaagctaaacacagcaccgtcagcagagcaaacccaagtaaatctgtgggtaatttgctgctgattctgctgcatggaaagtggaaaggcctcatggtgggttttctttttcagattgagtatgagttggatatttactgttcattactcttatattgagtaggaatgaaagcaggaacaaatttcatctttgttgattgcagttgctagctgatcgagtggctagtcaatggtcatcacaaagaataagtggtcaaggtcatcaggaattcaggatcaaaagatgaattgagagttgaatgagagtgacaacctgcagtgcttgcttgctaccgatagtacagtcattgattgggcaggcagtaacatcatgaattgtgtcgatcacaactttattcagcagtgaaggaaatatcctggaacatatggtgtagtaagtggtaagttagtagaccaagtcttccctttccggttgatcatcagctgttgcatttcgaaagtttgattccctacctatagctccacatttgccggctgtttaccgttccttttttttccataattttgagtttttgacaacaatcaaaccactagcttcacacgaaatgttgtaaaatctgtagcaaatatggtaggctctacgtatatacatgcatgtttcatacttgaataataacgtaggagatacatttcatcaaataaaagaagtatgcttaatatttcattggggctcatcagagaagcttagttctgcagtgctcagccctggttgatgctggagctggaggccaggacacaggtccagcgcccgtgatcctgccttgcagagcccttggaaaattgcaggtgaaactagcatgcatgcaggtatgaggtaaccaggcttgctaagatttgctcaaatctgttgcagatatagtaggcactataatcccataaatatcaagtctctcgaaataaaatgatgatttttttaaggattttgtctttgttttcttgtacaatgcaaatcgtggcaagtactgtttatttcttcttgtgtactcatatatcgatgttgttattcagcgatcaaagtgaatgatgacaataaagttacacggaattctgcaagaatgaatttttgatacatttagactgcttcgattcacatcatcttacatagctgtgtacttatacattaccagaattcctggatcactcttcacccatgtattccttccagtttattatcaaaaaaacgagttccctccaatgtccttttctttatttttgtattttccgcctttcataggaaaacctgaaccagaacaagaggtatatttcgtgcacaactagactaagcttgtaaccggacatgctgcttggatcttaacagcagctcaaactgaccaaagttatcacaaaaagtacatcagatctgcaataggactagccaaaaaaaaccttgataatactatttgatcatatagcacacctacacagaagaatgcgacaaaagcaatcgcaaagatggtcttttgagtgctttgttctctggagtctgaaaactggaggtgtttttgccgatgcacaggtgcgaatgagcgtatgaccacacagctttgggttcccatcaaaaccccaatactcatatccaattggaactgacccctctaagtcgttgttagaaacatcaaatattgaaagtgagtgcacattgttcagtcctggtgggattgaacctgtgagatggaggttagacaattctaacacttgcagatttgtcaggttgaaaagtttcggtggaatatgccctgaagagctgttgaagctcaagaagagcactgtgagtgatttcagctggccgacctctgaaggaattgcaccagtaagcttattgtttccaagatttagcattgcagggagagcattggtcataccatatgtaagtgatggctcttcataatcagcataaacaggaagttcaaatacccttggatccaaatgattgtagcattggcatctccattattgctactgggagatcccttctaagattgttgtttgatatatctatgaagtagaggaagttcaggccatggatccagtctgatattggtccagtgagttaattgtaggatagatccaaaacttccattttgagcagttttgaaagccaacgaggtattttttccagacaacgagcaagaaggtaccgaaagaacctgaagactctgaaaaccatcaactattggtatgccatctggcatggccttgcccttgaagttgattcccataatcaaagtgttgactttttgcagttcttgagtgcatgaattgcatttgagatattcccaaaaacattgttgtcaagtgataggaacaagaggtacttcaggttctgccagtttcatttggaaggaagctggaattttttttcccaatgtaatgagtagagggtatagtctgcccagtttcagggtttctccccctccagtcggaggctgtgcctcggaccatgctcgacatgcttttgtcgatgtaactatacttttgtactttgttttttttttactaattcttaatgaaattggttggccactctttggctgacccggcaaaaacgagggacttcaggttgtctattcttggtgacaactggccatagaatttgtttgaagatagctgtaatgtggttagattgctgcatctgtagatgctatctagaatttctccagtgaacttgttcgacataagatccaaaagtttcagattgggcagtctggagaagttaaccttcgaaagctctcctgtgaagttgttgtgcttgaggttgatgatcttgagacttgtaaagttgcttagagatgatggaaacactctggacatcctgttgttatccaactggagctcctccaatctattaagctgacctatggaacccggaatatcaccgatgaagttgttatgcttgatgccgatgattttgagactagtacagttgcctagagctgatggcaactccccagacatgctgagtttagtccaaatggagctcctccaatctcttaatctgacctatggaacccggaatatctccgatgaagttatgcttgatgctgatggttttgagactagtacagttacctagagctgatggcaacttcccagacatgttaggtgtagcccaaatggtgcttctccaatctcttaagctgacctatggaacccggaatatcaccgatgcagttgttatgcttgatgctgatagttttgagactagtacagttgcctagagctgatggcaactccccagatatgttgggtgtagtccaaatggagctcctccaatctcttaagctgacgtatggaacctggaatatcgccgatgaagttgttatgcttgatgctgatggttttgagactagtgcatcttggccgttttgagacttgttcataacgcgcaatttcaccaggagattatggaggatgatgcaggggtggatcggcatcgactttccgttgcctacagggaacgaatcaggcattgctgattggtggatgaaggcgagactcgcttttcggacgggctacaggagtattttcgacagtgcctttgtgctaacttgttggctgctgtggaaagagtgaaatgcgcgtgtctttgagcaaagattttgaagcatagagcaacttgtgcaagctatcaaagaagagatcatcgtctggaagacggcaggagtgttcagatcgtgcaacaacgagatcacgtaatatgtaattcatatttgtcgaagttttagcttaccgggtcggggtcttacccctatcctttacgacagcatactgtcgttgtaagttttaacatgtaacaaccccccccccccctcttctcttaatgaaactagtatggtggcctgcgcaaattgcgcggctagcatcattatattttctctcatataatagcatatatgttttctcattatattattaaaatatattacaatgataacataattttaaattttgcaataactttacgaaactactaatgtgtaatattcatattgtattttatatacgtgttagttattaattatttttaatatcaaaatttagttatttgtaaattatatatattcctatatggactctagactcgtcttttaatatttctttttttaattctgaatgtttattatttctaattgtatttctatgtggattctaaactcatctttcaatattctttaatttttaatttcaaattttagttacttctaaattgaattcctatattgactttaaactcttcttcccatgtttttcttaatttcgaattttagttgtttgtaaattgtatttttatacggactctaaactctacatttgattttattatgtttatttcggattttagttagttttaaattcctatatgcactctatactctacttataatattttttaattccaaatttctttttttttattaattgtatttctatgtggactctatactatacttttaatattccttatttttaattccgaatttctattattgtatttctatatgaactctatactctacttctaatattccttatttttaattccgattttcagttctttcctaattgtatttctatatggactctagtctcctcttgtaatattttttattttttaattccgaatttcaattatttctaaattgtatttctatatagattctagtctcctcttctaatattccttattttttaattccgaattttagctatttctaaattgtatttctatatggactctactttttctttttctccgattaatgggagaacttttaggtcatgagagcgaacgtggaggctcctttttattccgaattttagttagttttaaattcctatacgaactctatactctacttctaatattccttatttttaatttttaattccaaatttcagttatttcctaattgtatttctatatggactctagtcacctcttctaatattccttattttttaattctgaatttctatttttttcttaattgtatttctatatgactctatactctacttctaatatttcttatttttaattctgaatttctattattttctaattgtatttctatatggactctatgctctacttctaatattccttatttttaattccgaattttagttctttcctaattgtatttctatatggactctagtctcctcttctaatattccttattttttaattccgaatttcaactatttctaaattgtatttctatatggactctagtctccttttctaatattccttattttttaattctgaatttcagctatttctaaattgtatttctatatggacactgctttttctttttctccgattaatgtgagaatttataggccttgagagcgaacgtggaggctcctttttctattcctttaataatataatagattggtcgaccgaacctttcggccgacccggcaaaaaagttttgagactagtacagttgcctagagctaagggcaactccccagacatgctggtgtagtccaaatggagctcttctaatctcttaagctgacctatggaacctggaatgtcgccgatgaagttgttccatccaaaatcaaggattaccgtattaaggagtttgatacaagtttttccctctatgcacgaatctcaacattttttctttttttttttttgccagggcagccgaaggaagggccgtccaattttattcagatttgggagatggttacacgaatctcaacattgatccgatggtccacgaagcgaaagtttcttggagaaaaatctgtcgacaatagcaaatctgttctcaaatagaaggctggtgaaccatagctagcaaaggagaggtgctccaacgaatctattttctatgagaaaaatctattctatgctcatactttttcttactattttctatgagaaaaatctattatatgttaatgacttgggcactctatctactaatgaaatttgcaacacaattaagaagttatatcataaaaaatgcaatgagatcttgtatacttgtggggttttcattttagaatgcgcaaaaggattgcgcatcttttgtattaagacttgggaagtttcaacaacaaccagccaacaactcagaaaatgagaagaaacaaaggctaaatggctaaaagaagaggcctaaatctcacgacatctaaattgcgaccgagaacatgacaggcctactctggaagcagacatgcttccctccacaggcctacttctgcttccctccacgggcctaattatggggtctgtctagctgagctgtttttttttaagaatgcatttaaggattgcgcatcttttgtattaagatttggggagtttcaacaacaaccaaccaacagctttgaaaaaaggaaaaaagaaaacaaagaaacaatactggatagctaggagtaggggcctaattctcgcggcatccgacttgcgaccaagaacattaataaaaccattattaatagcagtgacgtcttgcacatactgtatgagtcattcccaactcaagacattaataaaaccattattagttgtttgttgtcttgatcatcgctggaagcatgtcctagttgagctcaactcatataagatgggttaaatatgtgagggtaaaaaggaaaatgcaattacatggaaaatttatatatggattgcagtgaccacttgttgacaataccattagatggcacagaagttcaatatcctgcaaattgattgaggtggcatcagttttttggacaatttttgagctggcttcatgcattaagtaggtattctcagaaccaaaacaaatatactacagtaaaaaagaagtcacaatcaggcagattgtagtaaagaatgtcagctagacatgcccaaagtcaaccacatacgtgctgttgtgtagtcacattctcaaagtcaaccaaaaccaaaactaatcaaatatacctgttgtttttgtgtaggctgtcctaggtaagcaatgacgaggacacagcagcataggaagctggacaaggcatttcagagatcacatccatttcaaggtactctatccatcccaaaaaaaaattcaatcctaattacgagtctggacatatgcgtgtctgcatgtcaaggtacgtagctagaattttttttagacaaagtggtacatatgataaaggttggagaagagcagtaaacagggacaccacatcgtcgtcaatggcgtctgcggcgatgagcaggtaactactaactagcttgctgcagaggtcaatcaatcaatcaatcggcaagattcacagaattccattgctttcatgctgtgcaagaagatcatggcgatgaattagatgattaattaacttatggcttgcagcaacaagaaggagctggaagccctcccaatcgtcgacgccggcgaggttcgtgagctcatgagctccggccaccattacctcgatgtcaggtagtacactctatctacaatctctatggtattagaatgttctagaagcttccatgctcccctttctgtttagctaccattcttcacctgctgccttgctgctgatttgattaatgatcattcctaactgtcacttgatttgcctttttcttgtgttcctggctgcgattaattgccggtgaattggttcatggaatcttcaggcttgggaaggattttgacaaggcgcatgctgacggtgctcgcaacatttcctactacctctcagtgactcccagtggtcagttcagttcatcattcttgccttgctccactgaagaattcaaaattttgtgatttccatttctttcatatgagttttccactgtttattttctaaaccttttgaagctttttgttgctgatggttctactacttgtgttcatctcaagggaaggagaagaacccacactttgtagatgaagtggcttcactcttcggcaaggatgagcacctgattgtggtaagctcaccatcacatatagcactgtattactgacaattaaccatagtcatgtttttttcagctacttcaccggattattgtcacggattatttgctccatgcctttaaaaatatgttttctcaaaaaaaaattctactgtgttgcttagattgcttgttcaaagctatttgttaagtttattatgagaatatttagtttatatctataatcatttaggtaatccactgtaataatacggtcaataatctgttttaaactagacctgtcaaggtcgaaaagctgaagctattgatgtagctaatatactccctccgtttcaaaatgtttgacaccgttgactttttagtacgtgtttgaccattcgtcttattcaaaaaatttaagtaattatttattcttttcatttcatttgattcattgttaaatatactttcatgtacacatatagttttgcatatttcacaattttttttaataagacgaacggtcaaacatgtgctaaaaagtcaatggtatcaaacattttgaaacggagggagtatataataatataaaaccgcaaatttgacattggaatatctgcaatttctaccatggtttgggcacaggcttgcaacacaggtgtgcgatccaggctcgcgactaaggaccttttggacgcggtaattaaagcctgtccattctcgatttaagcacaatatgcatatggttttgagtaattgggggtcattagtttaatccgtcttttggatgtgaagggattcaagaatgtgaggaacctgaaaggtggttaccaatcatttctccgaagtgaaagccagcaacctgcagctcatcaacagtaattatcagctgcagttcccctgctcggtgctcgctatccgggagatggaaaatcgttttcttcttatgcataatttcaatggtcgtgaagacgaataaatcaggatcagttgaatccaagctttgcagtgtgtacggtttagcaagaaaatctcataatgtcatcaatcaataaaccttcagaaaatctttaagaagtgttgccatcagtgaggctaatgccatgtcaactgcttctgttgtactcatctgccgctatattatattcagtaacttgaccttaattttattccattttacaatacctttttctgattaagctgaccatttcttttctcttgtgtactacactcttgttccttgtccatatcacatacaatttaagagtacttagcattacaagtaattaaattacagaataaccttttctgatacaaactcagtgacgggaattaacgataaccaaacaaaatgcgtactactctatttggtataagaagatcgcagaaatgtctggcagagctgtgtgaccacatcatttttggggcttcgtagcctgacatatggaacaaaattagtgcatgtcagattagctccttactttccgacatggatatgttgtcaattggttcctctggcccagctgaaaacaaactatgcttcctctcaaatgaattagattcagttgaggccaaacagaggtctttacacaaacgatagacttgtgctgattgcaaagctgtttcatagcacctccttttctagtttcaacacagccataaatgcctcttgaggaacatcaacccttcctattgctttcattctcttctttccctcagcctgttgggaaatgtcaaatggtcatatcatcttatctctaattggcgatagtgaataaagctactagctttggctaagcaccccaaaagaaaaaaaaaacttatttgaatctgagatggttgtggagaaggcttacctgtttcttcagcaatttctttttcctcgatatatcaccccctgaaagtaaaagaaaataatgtccaacataaacttatggaaattcacaatgtgaaaatgcagcgatccttttttttttcctatagatacatatttgaaacaactagtcatgaacagaataagacaacagagattattccaatggatttatgatgatctcaaagtgcaagtcttagtgttgtttaccatagcattttgacaagacatccttcctgatggctgatagtgcttcacttgcaatgacctttgcacctatacatgcctgtcaaagtcctagttagaatatcattcctaattaagagataattaagcagttttgtctcctcatgaatagatggctacttctgttttccaacaagttataaaccttttttttggtgcagaacaatgatttggttgaaataagaatacaagatcaaggcagcagtggtaccagtggcttctttaattttgttttagttaaaaatgcaacatcagttcaacaacaaaaatggatccactttctttcttaatataaacatcttatagggtagacttaatcacaaattacaaccagcaatatttccctgcctcagtttgcagtgcaattgtatagacaagaaatcaggtagaagcaaagcgataaatctcacttgaataggtactctaaacatttgccgaggtataagctcttttagcttttgagttagcgccctcccgacagagtatgcctatgacaaaaaaatagaaaatcagattggcctgagcaattattgcatgataaccagttaaatataagccattgcttctcaaagtcaagttggcgggagaaaatattcaaagatacagttaatcacacaagaagaatcacggaatgaattgtaagcatgaatatattgactgcagatttcttaacagagcatatggatacatcgaagtataaaagaaataaatcaagggacttaatcctaaactaaagcaatacatccttaacaacaaatacaatgtatatgaaaatccaatcatatttcatgttcctactatctcttgtggtttcatataagtttgatggcattggtggtgtctctgaatatcacaggttgtctcacgtagtcacggtatagagctacatttttcaaggatgtgatagagaatagacccaaggcaagaccgtaagagtaatagcttccaaatttcaagcaagtgtttaacagaaagtgagtttgcatacacccaacttttcttatacacaaatatgtatgatcatgaatataatagcactggctagtaagcaacttgagtttagtaccttatctctatgaacaattgttgacagtgcctccacaggatcaccattgatctgtatatccagctttactaggttactttccctgtacctgcaaattaggcaaatataatatgtcagttgattttacagaagaaactattaagcactggcaatcgggtaaaacaaaaggcaggtaactagctatgggttaagtggtaaagtaataaattttagtagtcaccaagtgttactcatatgcatcccaggtgccaggacattctaagatcaaaagaacttagtatcttattaatatcacccatcttagacacaagttaatgttgtttggaaagcaaccacctctattcatgcttcttcaaatatttaaaatgatcgttaaaatgagatatgcctttttacataaccaactgttacatcatgacattatgaccattacagtgtcctggacttgatgactagagagatattaaattaagagaacaagggtgcaagtacccgataagtgaatattccatgctagcatatcctttacttcgagatttcagttgatcgaaaaaatcaccaaccatctgcaaaaatgggtacaaataagtatctacagagaatccaccagtactatgcagcaagtcaagtatatgctctggaagatatgtacttcttgatgtttaagaatatacgctagcatgaaccaaagagttgagattacacaaaattgagaacaaaagaacagcattagagacatcaataaatgaaatatgcttaccctaaaggcctgtttgcattatgatgaaggtattagtgactggtgcatattttatactccctctgtcccagtttatagcgcgtgcaaatatttttgctaagaccaaggtgcgagcgtggagagaagtttgttactgttgcaaccctaattaagtgcattaattttatcgcttcgtttggacgtggaagaaacttgagggcccaggccatctgcatgcgtctgcacgctctatgcgcaggctatgctgaaactacatcatgcatcattaacagggctaatctcaggagaaatggaaccggtttaaagttgcgccttatgttgtgggacaccagtgaaaatattgtgcgccctctaaactgggacggagggagtaatctgtacaacgtagaaacccttcaaacgtctaaacaatcatgtcctctctatctgaaactcctgtttgcataatgctttatgtatgttggaggagttaaggtatgttttccccttttatttgctagatgaaaatagttacaatgaggtgcaacatgcatggtaatgattttatatagaaaaaggaattacctctgctagcggtagctcataaacaactgatgccctattttctgtgatgaagttcatttccttgaattcacctcttctctcttgacccagttccattattgggccaatatactcttttggtgtaagcatgtcaatctaaataaaaaaaaaatgcagagatcaaagaagagaatcagatacatgcagaattcaacactcccaatcttaaagatgactgtaatggacggtgaaagcctgtatacagaagaaacaaccttgacatatggctcttcgatggatctccgtttaccaggttctggaagcaaggatggattcgaacattcaacctatattacagcaataagtaagcatgtcagtacattaacattccaatgccaaataaacaacactgacatgtccactagtcaaactgaacaagtaattgcttgattaactctattgtaaggaagtctagtctagcaaagtcgagcaagttggtgcaaacatatgcaccctgcaatgatttaattactacatatatgcaagtaacaattgttaatggcttccttaactcactttctctaatgaagtgctcaacaactatttccttgaagtgggagaaatggtaagatgaaattatgacacattgttcagtgttaatcttgttgacatgctcaacacaactgtagatgattcttcaaaaaaagaatacattgataaaggacatatagcatagttaaaccttgcaggccctagcaattactaatcctaacagcaggagatagagaagttcttcagggtcataaagaacttacagtttcgccatcggctaggttgacatggtaaactacactgggtgcagtaattattaagttcaagttatactctctctcgagcctttcctgaacaaagagaacattatgttgtcgaaatttcaagtcaccatagctgtaatatgagatggactagtgagagtgaagtagattataagaacctgcacaatctccatatgaagaagaccgagaaatccacatctgaagccaaaacccatggcacttgaagattctggttcaaactgcattgaaaaccttgttactgcctttagaaaagcaaagatgagaaatgcaatgcacaatgctaattagtcaccaatcaacattggcaatttggcatctgccataccccctagctttgtgaaatgacttgacagatttgcttgcatttccctctacatatgatccaaacattcactcgcctaactctaaatgagaagaaatgcatcaacttttctttctaactgaactaatgtattcattctttccacaatcaacttttactgcatatttcaattttataaaaatgagataaaaaatatagagtttcttcatcaaaatcatattgcctttattttgcctgcattcaatatggagtatcatgttcctctatgaagtttctacagatgcattgtgatgcagggacaaaggtaagtaagaagatgcttcaacttcatatactggaaatgcaaacaaaccaaaacagcttgaaatatgcatttgtgctaatctggtgatcttgtctcaagatatatagggcaggaatcccacctttaaagcagcatcatttagttgaagcttttccaatgcttcacgtaactcctcaaacctaacagacaaccatatttaatatgtgatccatgtgcagaaaaaataatggaaaaaatttcaagggaaagtatagtactgatccgcatctataggaaacaagccacaaaaaaccattggggtagcttgggaatatcctggtaaagcacattctgctctttttgaagaatgagtaattgtatcaccaaccctggcatctgcaactgatcttatggacgcagaaagataaccgacctgaaaaggaatggtcaatgatcaaaccacaaagaattcttttttgcaaatattgcattactaacaacattagcttaatggtgtatcaatagcatattcaggaagccagatcaaaatctggcatatacatagtaggtaccgatgtttatatactgaggaaaatggggatctacttcacaaaaaaaataaagtggaatgaagatatagtcaaacataagatttatggttgatgtaagatatggtaacacaaaagttacctcgccagcgtaaagttcactaacttgcatctgattgggagataatactccaatttcatctgcaacatattcctgtttatttaaaaaaaaactcagcatggtgtctctacatagataaggatgatgaagatgatgggtgtagcatttgatttttagaagagttaattataaaagagtaaatgatattatacagagaaaaacctaatagaagtgtagggggaaaaaataatgctcctgtgcagttgtgtataacaacagaaatcagatggaatgttgcaaaagttgtacgtttacagtttaatagagctattttttcccaaaaactattttatcatagcaaaacactctagtttgcttcagagatttcaggctttatttagttacctttccgctagccataaaacatattttgtcccctttctttatactgccatcaacaactcgaaaatatacaattacacctctgtatggatcataataactgaaacccatagacaaacaagaataaggattcaggtatatgcacaaaaaaaaaattgaagaccattgtagtatcattgtctgcattttgtaattttagcacctgaaacatccattgaggactgaggagattctaaatagtctaagttcttaaaagatacctgtcaaatataagagccctgagaggacttattgcagtattctgtggtgggggtatcttagtcacaatggcatctagtatctcagttatgcctatgccctcctataaacaaacaaaaacaaagatgttaatatatgtttataaagtgggggatagaactttctgtgcataacgcatgtgtaagtaactctgaaggctgaacagagataaagtagcaaaaaaacaacctttgctgagcaacgaattgcattactgcagtccattccaattatctgaggataatagaaaaaagacaagcatgattttagcaataagaaccaatgtggcataacattgaatggaaaattcaggaactgttgtcagcacaatccagtataagaaaggtttaatactttcagaatacctcttcaatctcctgcgcaacacgatcaggttcggcaccaggaagatctattttgtttagtacctaaactagaacaagtcatctgtcaaatagaaagaattgaaaatctgtagcagaatgtcacgtaacagttaaagatttaaatgttttcatctatagcaaaatgaaacatgaaacagatgctccactatgttgcagcttacaagctagtttgcagtattgtccagttgaaaagggcaatattcacctcaagcagtatacattagttatcatccttactcagtttacatccagttaaaaataaggcaaacatgcaacgttcacataaaagttaactcgaacatgaaaaccttaggcaaaaccaaatatgtacgaatttgttagcagtgaaaagaaaatatttgtaaaagttagaaggtaaggaacctgttagtgtgcctataacgtaacaattcaaactcaccggtatgatttcaaggtcattttccagtgcaagatacacattcgctaatgtctgggcttcaacaccctgcatcatcattacatatctctcaacatgtcagaaagattaactcgaatatggtgaaaacatttaggtagcttctataggcaaatgttttcaaatacatagctattgaaacttacaggagggtaatatatattgcacctgagaagcatcaacgaccagaagtgcaccctcgcaagcagcaagagaacgggaaacctagtaagcagtcagacatttaacatgatgtttcaatcaaactccaaatattgagaacatgctgataataacagagtatcatccaagacactctgaaaggccttagaagaaatttcaataaggtgagaccttaatgcaatatgttggtcttactttaaaaaatatctttgttgttttggcaacagcatattatgtaagagatcaaaatggaagtagtaatgctatacctcatatgagaaatcaacatggcctggtgtatcaatcaaattcaggcagtagggctcatcgttcatgatgtagcgcatccgagctgcctaaaagaacaaatgattatatcgacggtacaaaatcaataagatatggaacacctaatatcaagagcatgctaggaaacttcagtccagatgaaaattaaattacaataacgatgtaagctgacaagttgtgacaacatccagtgaaaaaactgttagttgacttggtgcgaaagcgctgccctcttcttgactagtgttgatgctcattcttagttctaatactagtaaacctcggagcaactggccaaaatttaaggaaacaggaaaaatatcgtatggtagctaatttcaagtcatttctctctagtatctacatttatatcaagtaattacttctttacccaatgtaagagaaggaacaatgagttcacataattcggccaaatatattttttccaccaacctgcaatttgatggtgatccctctctccctttccaggtccatgttatccaggaattgctgtttcatctcccttttctgcaccgtccccgtgagctcaagcagtttatccgccagcgtcgatttcccatggtcgatatgcgcaataatgctgaagttcctgatgttcgaaacgggaacctagtagagcagaacaccgacgaatcgagatcaatcacaacagcaacgcacttgaaacgaatatcggaatcgcaaactctaccctgaatttcgtgttcgtcactcgagcaagcccaaaggcgcgcctagacctaagtgatactaacaagcgaggcgcgcgatggggcgactaccttctggaggcggtcctggccggcgtcggtggtggacgccggcgaggaggcgggggcggcggggcagacgacgcggccgcggggggccgcggagagggcgcgcgggcggggcggggcggaggggagaggagcggcaggcctacggcgccccggcgcgtgcggcgacgtccgcggcgccggcacggcgaggcgggaggcggtggcggtggccatgggaggaggaggagcgcgcgagcttctccgccgcaaggttgccgcgcccgcgctatccacacacgaggacgagacgagacgagtcgcatggactcgtgggtttgtgtagccgttgcgttgcgggccttgcggctctctccttgatgggctgggctgattttgggagaaagcccataaagtaaatgggccgcacgtaattcgcaaggaaataagtccatgtcaggtctcttaattattatgagtcgaatttgactcacgtcctcaacaacaaaacaagtgtccctcaattatcaatgtgccacgtcaaaaagactaaaccatcggggggactcgatttgcactgattttgatgattaagggatgctttgtacttggtttttggatcgagggggtacaaataaaagggttaatttgatccatataattgcaaatgtgcctattcagataaatactattacagttcatatatacgtagccgtgccattcaaattttataaaattaaaaccatgccattaccatcacgtttttcatattcttcctaaactgcgcatgggatctatctgtcagatgactcaattcatcttcttcctttgaccctcccttatcttcttccatttaacctttagatgagcacattatcgagctctgttcctttattgaaacggaaagttgtgtgactttgttggcttcttgtgatttagcagaggaatatcaagtatccaaccatcccaactagtacttctaccatctcagaaataatcagtctagaaatggatgcaacattatgtcaggatcccgggtaggccacacacgggctggtcagcccatcgccatgaggcccaagcaaacggaagggagcagcatacaagcagcagcgtcggcaacaccagggggcatcaaaagatcatttggacttggcggagctgaagctcccggtggcagcgacgacttgggcggccgatgggcaccctcgtcgatctctctccctacctctcctccgatctctagccttcccccctcagttttagaagtttctagcacttgtattccatagcttcttcttctcttgtccccaaaacagttgttgcttctatggtggatgcttgttgttgagttggaagtagtgggttcctaacaatctggtatcagagctgtcgattcgtgggatttctagcatggagttgatgggagagtactgcagcaacgccccatgcaagtggttgttggatttgggcaagggtggtgctcatgacaccaacgcccacaacctgttcgatggaatgcctagccaatctgagatgtccaaggaagatcagaggacatctaagcctgtccccatcaattctaccatgaacaaagaggagaaatggctggacaaatctctagatcggatattggagaagtttgaacaaatggaggccaagcgcatgcaagaggagtagatcaatcggatatttcaaaagttggaagatatagaggttcgtaggagcaaggcttccgaggaaataattgcagccatcagggcaaccactgctgttctcaaggctacatcacctacagcacccatggcaccacctactccagtgcctaccaagtgtttgacagaatgccccaacaacagcttcacttgggcaacagcgagttcaagtcacattggtgaggatactgctccaacagctacctgggaactaggagacaataaggacaagggccacgccccctacatcgtcaccaaggactcacccgaggtcacgcccaccatgtgttcgacgaaatgctccggtcctaccatcgagcccgatctcactgtggctgtagtggttacgtccgccaccactgccgcggcctctatggagttggtagccgctgggaacgcaatcggtgccactgacatcaacaatcttgaccaccccaaggtgacgcatgctaagtgttcgatgtttggctccggcgtcaaacggggcactgaacaagttgtgcttgcgttcccgcttatggctagccctatggagttcatgacatcattggtagaaccatctccacccacagggctaaagcttggtgatgccatctgcgtgggagattaggtgcctatgaagtgttcgatgaaatgtactgagagtgacaataagccactgatggaacaccccaagagaaacccatggccacctgcctggtcaggatggaagaagtgatatatgacctggactacaatcaatcatcatgggatgagattctatttcgtcccaccctggcctccaccaagtctagtaagttctttggcatgggtgcatttttgtgttggagctcttatacttcaaagggtggttttatcaaatgaaatggttgagttggagccctggcctccaccacatgaagcaagtttcagaattttgcctttccaaactagtagcaggaaatgttgcaattatgtcactgctttgagtataattgcatgggatgagaagaggacaaggagtagtagaattattgacagtagttttgaggaagggatacaggaatgttggaatccatatctagccttgccaatccctagctatttcaggaccagattgcaatggatgccaccttggctgccattagttggtttgctagaagctagagtaggaaagggttgcactactaattttgctgcaagtataattccttggaatgagcaaaagaaaatgatgactattgaaacttccacttgctttgagcagaaaatgcaccagttttgggctttgattttccaggtcagtttgacatcacttgctagcaaggaaagcaatctagttatttctgatcctgaatcattatctgtttggttatcatatgttgatctctggggatgttgctcaactactacccaactatagtggagaaatggaatatgagaataatttgcatggtgatatcagaatctgaatcatgtttggaatcaaattacattggtttgaatgttgaaagagatttgctatatgtgattgctgaagaaaaaggttgcaaaaggatgaaaggaatggaagcagacactaattcaattcatgatgagaagtatacttttgggttagttcctacaatggtgttgatcaagcgaggttgtcactgtttgcagcatatcaaattgttgaaaatcaatgttggcaagcaattcgtaacagtgctattgtcatgcatcacccaggagtactttacatggagtaagcagttattcaagctaaagctacttgctctattcttcttcaatgatggttcattgtctaacaccaaatatttggagcaaccatgggatccgggaggtgtattccatcggcttggggacaagccgaatttcaagaagggattgtcaggatcccgagtaggccgcacacgggctggtcagcccatcgccatgaggcccaagcaaacggaagggagcagcatacgagcggcagcgtcggcaacaccagggggcatcgaaagatcatttggacttggcggagctgaagctcccggcagcggcagggacttgggtggccggtgggcaccctcgtcgatctctctcccctacctctcctccgatctccagccttcccccctcggttctagaagtttccagcacttgtatttcatagcttcttcttctcttgtccccaaaacagttgttgcttctatggtggatgcttgttgttgagttggaagtagtgggttcctaacacattaccttgctagattcattgtactaggtagtgtcccatccacttttaggttgattttttctggaacggagcgagtatccctgaagagcaatgcagcacaagtcatctctcggattgcctttagtgtattctttggagttggaatgttgtatttcggccatttaataattgtgtatctttgtgtgagatgataatgcatatatgtgtgcgcgcgcgcgcgtatagttcagcagagtagctgatctgactcgagcttattagtgcaagcatataaatttatagatcaagcttaataagtgcatagagtgcattaatacacatcgtgaaaaatgtagatccttagttaaatgccatctccatcctgattaaattttgagtggatcgcagtttagacggtattttattaccaaacttcactttgtatcacttatagccatttggggttgatagttttaatgttattttatccatttacatctagcttttcatcattcagttaaggtgtggcctatgctccgggaagtccgttggcatgcaagagtcaagaagattcaccgcaaaattaagttgtgcggagagaaaatggttggataaaagttggtccaatgtgaaatgttattaacacaagtatttattaaatgtaaaatgttattaacacaagttggtaggagtatcatttaaaagttggtccaatgcgaaagtttatgagcacaagtttttaccgatgtttcttgtaaatcaccttttatatagccttttcactttagactaggtaactaataatttttgtaatttggaccatccaattctttcatatgcccacatattcttattgccaaatgttgaccaaacgatttagttggatggggattaatagaatagtttggtggtccgaagcaacaatgataaaaaatatatatcataaatgagaaaagtcaggttagaaagctagtacaaaggtacaaatttcggtaacaaaagcatcatatattcaccaggcgactaaaaatttcataaatgtcaactggcttttaatagttaagattgctttacgattcgtgcagaccttctctcctcgctcccttctgccaccgacaatccttccaagtttgagggccccaatcgccctatctctgccactacgatcctcacctggaatctaacccggtgcgtcgccactatattgtgcacaaatcgacgatagatagattcgactagttcctcctgaaaacaaactattatcgaagttggataataaaagataacccaaacattaattcagttttcaatacataaccaatttacccaatcagtaacggtttgagacatttagtacacgaatcgggcatatcagatagattcaatttctagttattcctgtcaacagacgaattgcgaagctggaaaataaaagataacccaaacaataattcaaattttaatacccaaccaatttaccccaaccagttggtaccatctgagatttttggcatgtgtttggtttgggaaatgctcatctacccgtttagcatgagggatatgatggtcataatttccaggggatggctcacatatcaatgattaaaaaaaagtggattgaattggtcctctaatttttgatatatcagtccaacccagatattaagggagtatttccttttagggataatcccacttcacgtcttcacctattccccaaccaagcacaatgaaaaatgattttgactcaacccgacctattaaaggggtgtttagatccatgggtgtaaagttttgacgtgttacatcggatatacggatacatatttgaagcattaaacgtagactaataacaaaacaaaaacaaattacagattccgcctgtaaactgcgagacgaatttattaagcctaattaatctatcattagcaaatgttgactgtagcaccacattatcaaaaaatggagcaattagggttaaaaaattcatctcgtaatttacacgtaatctatataattagttaatttttcatttatatttaatactccatacatgtctctaaacatttgatgttacgggtgaaaaatttttgtatgtgtatctaaacaggccccaacaagcagtccttatcatcagcagcctagcagcaagaacatccccgtgggtcccacatgcagtgacacatgctgccatcgaacccttgcaccatttcctcctataaagccacccaccacatcccatgtccccgcaaagcgaacactgccttcgccggcgaacgtccaatcatccaagccaccctcgccgccgccgccgccctcgttttccggccatggcggtgacaaagctcaacccatcagcggcgccgttccactgctcccgccgccacctgttcttcgcgccgccgcctcctcctcctcctcccatgccggcgtaccagtaccacgccacgggcgcgtgcgccgcggcggcgccgccacctttccccttcttcgccacctactcctgcgcctcgctcccgttccacggtcacctctacccaccgtgcgggtaccaggcgcagatggggcctgcgccgccgggcgcggcgttcgccaagggcgtcctcgccgcggcgccgccgccgccgcacggccgccctccgcacaagctcatggtgtgcaagggcgcccccacggtcaccgacgtgaagctgcgcgcgcaggcgcgggcggcggcgcgtgtgggcgttgccgccgccgtgcgggggtggcgaccggcgccggccaccgcggggcctccccggatgctggtggccgccgcgccatgcgggatgctgcacccggccgccgtggcgaggcggcggggcatgagcaaggtgtacaagccccggaagccgcagcgcgccgggagggagcggtcgccgtcgccgtcgccggtgttcacgacgaggccgatgtcgccgacgccgccgatgcagaagctgaagccggcgcacaccaccgtcatggtgcgcaacatccccaacaagctcacgtaagtgaaaccgccatgccctcgccacgccacgccacgcaatggcgccatgccatgcatgcaccacgtgcacgccgccgccatctctagcgcacctccattaatgtctcgttttgtggcgcgcgcgcgcgcgcgtgcaggcgctcggacatggtgcggctgctcgacgaccactgcgcccgcgagaacaggcggcgcggccgcggcggcgagccgcgcgcggagtacgatctcgtctacgtccggatggatttcgggtgagcaaacgaaatctctctcgtagcttctttcaaaatgaaaatgtctcaaaaatattccattactccgttcttgcaaaaaaaaaaaaagaaaactgcgatctttcgtgcaaaaaagaagaaactagtgcggtagtttttgaaagaacaggagtagaggaaagaagtttcttttgtctccattgtacattttgtaatagtacgaaaaaaatatcatggtcagaaccagttgtccttcttcaacagtgaaaaagcaaaagaagcaacaagacaaaaccccaaaaaagaaagaaaagctggtgacacagcaccaaattaaatctcagcaaaaaaaccagctaataaatccatttccacaactagcaaatgtacattgtactactactcctatactacactcaattcgttttactaattctgagctgtcattagacacatgatctaaagctggttgcgtttgggctttttgtgttggcgtttgttgcaggatgtgcaacaaggagaggagcagcaacatgggctacgcgttcgtcaacttcacgacggcggaggcggcccgcgggctgcagcgcgcgctccacggctgccgctggaagcgctccgccttcgactccggcaagatcatcgacatccgcgccgcgcgtatccaggtacgcaatctcaatccgacgcgacgcgacgagacacccagatgcaatcattcgtatcgcgaccacacaagatcgtactactgaaaatatactgatatgatgtgatatggtgttcgatcgtttgttgctgatgagttgtgcttttggttttggttttgcatttgcaggggaaggacgcgctggtgaggcactttgggcggacgacatactacgagtgcgacaccgacgagtacctcccggccgtgttctcgccgccgcgtgacgggtccaccgccggcgccggcgcgccgtcgccgccggcggtcaagaccgtcggcatccgtgtgccccctcggccgatcacgctgctcacccaccgcggcaacgtcaactgatcgatcgaagaaacgatcgtgctcgtgtcgatcgatcaagttcgtgtgtctaccgtctcgatctgagtcaaaccaagcaatgcaacagcaggtagctaggtcaggtgactagtgacagtagtagtagcttcgtttttttcgtttagctcgttcgttcgtttttctcttcttgtctcgtgccggtttagtggtagagtggcacggtcaaatccgaagtctaggcatgccttccctttcccattcggtgcaatgcaatgcaccggcagcagcgaggacgggaaggctgggagactttggacaatagcgtagtactaccatgtactgtgtgctcttctttgctctctctctctctctctctctctggtctgtactacactctgtagcatgtgtaacgtggtggtagcaatgtagcatgtctcgattcatgtttctttgtctgatgatgagagagtgagttgcttgggtttgttgctgcagcttcatctctgcctcttttttcttttctctgcgcatctgtgttgcaatgcaatgggcagtttggcacgtagtggtactgcatgtgttttgcccccacatctggtgcttccagggctggctttgccgggctttcccctgcctgctggtcctgtgtggtgcaactagaagcagcccagcttgtgatacacagcttggtcgacgtgtacaacgtgccaggaaagcagaagaatctctgccttgcctgcacctgttggcttctactactactacaattcggggccgccattaaaggggtgcgcaagaactgcacggtcaaacagtttcctcttccatgaaaccaaagccccctctcgagaaaaaacttggtcactctcacagtctcactcactcggcatgcatgcgttttgcagttgcagctcgattcatctgcttctgcacatcgatctcgatctcgtgtagcagcagcatcggcatgtttgtccgcttgcttgctatccgagtcgcccgtttctctcgatcgccgtttcctcctccccccctctccatatcgcacagagtcacacggatcgtagtataggtcacaagcgagcagagatgcatatgactctctcttcttcttcttctttttctcttcctttctctcgctgtttgtgttgcaccaacaagtgaaaagcagcggctgcatgcgatttttccaggacggggtttgcaggaggaggcagggagggaggcagcctttgtggccgcagagtttcccgaatgcggttgatcccggggacgctttgccgaccccgtcctttggccgggttggtgaaaatgtccctccctcctgctacgccgtagccagcggcaaaaggctagtagtagtacgccgcagcgcggtgtggctgtggcgcggcgtgcatggagaaggggggcgtgattttgcccggttttgacgcggaaatggcgtgatttttgcccggttttgacgcgggtgctcgtgcacgtaacaccatgcagagccgcggcaggggttggggttgggtttcagttcaacgttgcaatgatcgctcgctagcctatgctaccgtggtagtactaggagtacgagttgttcgttgctgatccagcgatccttctcgcgtcagagaggcgaggctgtagattactagagccatgatgatccgtccgatttgagtcgtgacatgactgcatgtacgtagcgtgactgtgcgattttgtgattgttgttgttgtgtgtgacattttgattttgagccgtggcagtgactgagactgaccttgagagagcggaacgaagccaagaaagccatatctgttgtcctttttgcctttctgctactgtctcactctccggacggattgtaccgccgcaccactccggacggactgtaccaccatcttatggttctgggcttggattttcgtttactcgctctttaatttcttaaagataagttctgtgaaaaaaaaatctacatatatttttttcttctacttcctctatcccatatatcaagttaagttaatttagtatataatgcgatatattggatagatgaccgtctagattcatattttcatagtattacgatgtctcatatttcgtacagattaacttattttggacctgttcggtaggcctaaatatggctgcaatacagccagccgcaacagtgttgcacatataatctcaatggctatggtagtagctacagttgcaggagtattgcagccgaacaagcgaaggaagtacataataaagtaactattcaaatttatagtagtacccttaaatagctatcgcgaaaagttagattgtccattaattcatcaatttcacctattttgggcctaagtaggagtattggcgatcatttggaaatgttggcattttgtgacggagtgaacattttccaaccttccgattggggcagttctaccactaccttttcaactttagtaattttacccttatttttctaattgagcatgcatttgacaattagagttggaaacagagataagaattcaaataccccaaacatgatcgaattcttctcctcttgcgagcaaaatattaccatgcgaagaaaaaaattatacacgacactgggtcaacatattgttggttaggccgaaactgtccataatccagtatcaatgctaatggttcctgttacacattgggccgcaattcgatcccgtgggagtggataccggcccaattcaaagcccatatggtgcaccaaactattagggtcacattacatgcttacaactcatgtctcttctgctgctctgcacgccattcttcgcggatctgtcgcgcatttctcccttgatccccttctactagtgctaatccattgagatgagaggacaattggggaggtgaaatgaattcaaagccgaataaatgagtttacaagatcgatatcattatctccaggatcatccatgccaatctacgatcgccgagagaaatccgctgccgaggacagggctgagactgacgaattgtcgtgcatcacacaaagaggtttgaagtgatggtttgttcaatctgatgtctcagtatttgaagggtattaatctgatctctatcaacaaaatgttcagccaaatctgttctgtttgcagtttttatttgttagtattattcattcctctgttcttttttgttggattattaactactcttcaatttttcttgtcaacgtaatctgaatccccaacccaaactgtaattttttccccgtttgcattaacacctcaagtcctcaacacttgtatcatgactattgtaatgcatttcgatataattacatccaccaagcaaacaaaattcttctctctcattttctttctaatcccagtgtattccgataacgtttacgttacaaattttgaaccaaattttctcatcttctctaccattttctatctattggtacaactgaaagcagcagcagcagcagcatcccccttttggatacagagatgcacgagagaggcggcggaaataccgaattttactcacggtttacatgataaagttattcacattatcacataagaggagtatcaaatcctgagtggtgaaaaagagatagaagaaaacgaaaacaaaaagaaaaaaagaagaaataattatccgtgtctatggaggagatggtagagagcttcttcgcagtagcagcaatggcgatggttggattggagcacagcaatccagtaccagttcgtcggttcttgctgcttgctggttggtcgtggtcgtggtcgtcgtaggctagagttcgccggagattgctggagacggctggtcgtgtgcaggctagaggtggagcagcgtgtcgcagcgccaatccatctcgtcggcttcggcggcggcggcggcggatggggacgaggccggcaggttcagatcgaacggcagcggcgagcagcgcggggcggcggcctcgtcgccggcgcccgaggcgccgtcctcgcagagcacggaggaagaggagccgcagtagctgcggcagtcctcgtcggcggcggggttgctgccgccgttgcgcggcggcggcagcccgagagctccggcggaggcggccgcggcggcgaccgtgacgccccacgactcgaccgtgctgctgtggctagacgtcgccgccgccgccgcgggagggagatgctgcggcggctgatgctgcggcggcggaggcggaggcgcggaggaggaggtggagggggggaagttggtgcgcgcggcggcgccgcggagcgacctcgcggcggcgtcgtaggcgcgggcggcggcctctgcggagtcgaacgtgccgagccagatcggggtcttcttcgccgggtcccggatctcggccgcgtacctccccgacggccgcctcctcaccccacggtacctcacctccccttcccccacccccacccccgccatcgccgccgccggcggcagcctcgccctcctcatcgcgatctcctccgacgaggcgagtagccctcctctctctctgactcttcctcttcctctcttttggctcgtctcgtctcctcctccttcgcctcgagcacctcgactatgcgtgcgtgcccgcgctgtttggtcggcacgcccaccccgtcccggtgtcactgacggggtggggcccaccacgacccgggcgtcggtttgttttatggcgcgtcccccgaccgcgtccggggcgtccacgtcgcggggccgggtcgcgtcgcggcgtgtttcctcatccgcctcttggggttggggttgggggggtggtaaattgtgggggcgtgtgagcgagggggaggggcaggtgtggtggtggaggtgggtgcggatctttatcgtggcatatggtccggaggagaggtggaagggtggaggaggtggtcgtcgcgctgcgtaccactagcgaggcatattcgctgcgccctgccggcctcgctcggccgtgcacctgctgcctgctgctgctggctgccgtgcaggttgtggagatgatcagatcagctgggatcttcgagttcagactttcaggcctgggggcttagggccgttttggattggattgaacccaaaatgttggattgaacccaaaatgtgtctaaccaaaattttttggtaacttaaataataaatatacgtttagatttaagttaaataattaatagtggccatgcttaatttagccatattttaaaatctggtatcaaaccaaacataggctctgtcctaaccaaaaattggtagtgtgtctagtgttaaaaattgcctactactagattttaacactaaccaatgaattggtatggtagaaaaccaaataggctcttccttttttgagtttttaaatctagatttaaatctaagagcttaattttaaatttaatgtggaagctttttcatggcgtttgattacctagtattgccttttcaacaactatgattagtttatctatggccagggtttctcaaatcgtcagtaaccgcgcggttaccggcgttactgcggaggtacggtaatagaaataacgtggtacggtaatagaaataacgtggtaacctccttaaattcaaataaatttaaaaaataatttaaatttttgataaattttgcacagtttcatacggtttttcacggtaaccgtgcttaccaccggggcgcggtaacccccggccccgacggtttgggaaaccttgtctatggctcataagttgtgaaaaaatatattgttataaaatttacgagtaaaacttttatatcggtctaaaatacaatgttgaaaataaattaagatgagaaaatttcaaaaacaaatcggtcttaaataagttttaaattttggttatggctaataaaacaacaaatgggcgatgagaggctagttttctttcgttcactcgtttgtttctttgttacttggatcctgtgtcttcgccttgtaatccaaaataaacacgtcacaacgttgtgtccaatagcgtctctgaatttggagacattcacagagcatttgcaaaagatgggcaggtaaagtagaaaaccgtccatgtctcgccttgacaacatattccttcatcatcaggtgtcactcacatacagtgtcacgactcacgaccgagcggggtcatctttatcttacaactgacgagaggtcagcgggctcactcgtaagggttcctgaagttcttgaggagctccgggatgtcgtacgcgagcatgtcgtccacggcctgcaccagcttgggcttcatcttctcgaacttgtcgatgttgtacccacccaacacctccttgaagtgctcaacgtcagggaagtctccggctggaagatggtactccctttggacctgttccagcagtttgaattcagatgcaagcaggtgaagattatggaaaaaaaaataatgcagttataagatccattttatcactgcggttggaaatgagcttcttgtgatgaatatagatcgaactatcctggcaattaagttgtttgtaagtactactagtacctttgcaaactcatcacccaggttgtctatgagtcgctgttgagccttagctttccccatcattgcaggcatctccttctttagatggccaattatgtaagcatgaatcttagcagctctagcacgtttaacaaactcgttgacctgcaagtacaaatggcgacattcattgaaaattcagcagttgaaaagaaaaaaaaatcagataagtgggagagaacatcatacccgacgatcacaggccttcttgggtatgtctttcagatcacagaggagatcatcttgctctttctcaaacaagtcctttccaattggtccaacagctgattcattcactggtttgtcattgaatgacctgcaaacattagtttcagagtgaatttcagttttcaacaacctccatctaactctgagagatttatatagtattttgctcatataattaaacagtcagttactagcgatgcttttagacttctaaaaatattctaagtacaagttttatgattgatacaggaattatacaacatccagtcagtcagtcagtcagtcaccagaatcaagattacgacagcactataaacagaagcaaaagatggggtgttaaataattgaagatgtaggaatttacccgatataaacacgcgcgacctcaggggtattgagtactttcccaagagaccacatcagtgcaccatacactctcataagctgcagcatgaataaggggattatgtgattctgatgcacaacatagcacattttaaaacagaatatggtgtaacacttcccgtattgattgcaaggaaaacctctacctgctgagtgtcaacttggtctgccttattcagcactacacgtattttgtcatcatggccacgtaaagatgcaatcacacgtttgaactcatcactgatatcaagcttatgaggatcaaacagaagaagaataaggtcacacttagcagcaaaccatgaagttatgccggtgaaatcatagctacgctgcgtccgctgcttttcaccagacaggacaccgggggtgtccacaaaggtgatatgatcgagcagcttcatggaagaaaaaaaaatggcttgtatcagtttgtgcaatgaatgtctttctgtatgtgttaatatcaccaattgaagcttaccggatgtggcatctgagagcactcgaactttgacagaaaagcaccgccaaatgtcgtaagaccagtgaatggcatatcagcttgaacagcaatagtattgccaggaatagtcctttcatcagatccagactagtacaaataaagaagaaaaatgagagactaatgggatcattatgtagcagcctaaacaacattgtaaaatcaccaacagatttcagaagccatatttttgctaacaacttaaaaagaatcaataaatgttctacaggtgtgcattgaatgaaactttgatgaaaacctgtagttccatgatgtaaaatggataacaatagttgtgtttttatccaatgtgtgctgctgaaggcaattcatccaataaataatcttaacagctgtagaaaacacgatatggtatatgactagtccacatgtgaaccattcaacttagaagaaagggagtataatgtatgccacccttgcatcttacaaccgaccaacctgatattgtcaactgataaactttttaatctattgacaatgaatgatgaagcagctctaacttggttttttttcttttgctgaaatacgaccaaaaatggtactttgaaagcacaaaatatattgaaaacaagagtatacaagaaaacaaaatcaatcatatgcaattttcctgctttataaaagatcccccatagttcatatgctcaagtaatagctaactcgatatcactgatgcatgttatattaaatactcatgttaacatttaccatgacaacaacaaatcggtcagtagtgggctctggtccaacatgagctcctgcagttgaaagggaaaaattaaagttatactctgattatattagaagagactaacgttaaattgtgcagtgtggctaagagtggaactgaaatattatgtattactacactattagttcaatcacagaacctggataacttgtttgcagcagatgcttaatgaaagttgttttccctgtagaatattgacccaagagcataaccattggttttgcatcaaaatcactgcttgtctggaaaatggtacaattaatgtaatgatatgtgagaaatagagcaataatccaattagcatgaaagtattcgatatattttcaataaatgtgaaccatccataccaataacggggaagcaaaatcgttgaaccggtatgcaacctccagaggcttcagtttttctacgtatagtctttttaagccatcaattacagaagtaacagcagtcagggggacctgcatctgcggacagaatgaaggtacaaaatcattaaattgttaagctgcagaccgcagtactaagaacatttcgatgactcaacaataaactataagagcaagaaaatgatattagccctgaagataaacatgataaaagtgcacgaaaatcctgaaacaccaccacgtaagtctagtaccttctttgctgattttgaactgaaccagctattagcagaatgcacttgaacctgaggggcgcctgcacgacagaaagaagttagcatcacagcctactcatcactgacatcattcaccaggtggtacccttgggagcacatttcttaccattttcttctgggtgtactctctttaccccagcctttgatctctgaaaatgccattgcaacatcacagtgagattttgaaatgcgtcagaattacaccaaagccatagattgtaaacttaccgcaagtagttcgtcaagaccttccatcacaggtggatccaaactactcaggtctgcaagaatcaccataaattcaggggacatccacacaaacactgaaatacagatcgcagcatcgcaagagaaacaaccttcgcgcttcagactgtcctgagtgatctcctcccccgcttgcgccagtgacacgagctgcatttgcgaatcgcaacagaacaacacaatcagaaacatcctctcgaatcagcagcagtcacagaacgacgaactgtaacggataaaggaagaggcgaagtggaagcaaaacctgcatcgcggcgacgaactcgccgaagccgaggaacccctgccgcttggtgtccgcgatcgcccagaccttggatcaacacagatttatcaaaaaaaaaaaatccaaaagaaaccacccgactcaaacaaatccaaaaccaactcgcggcggcggcgcacctgcttgaggtcggcgcgggacaggccggacatggcgaagaacttggtagcatcagcacccgtgacacgcccatctccatctacaccacccaccacccaccaccggcgaaccaaaccatcagcgagcgattctggggctctcgaagtcacacacacagagagatcgagcgcgcgccgaggcggcatacctgggtcggcgacggcgaaccagccggcgtagatcttgtggtgctccttggagcaggccgatcgcgcgagctccatgcctcgtcgcggcggcggcggcggcgaggaggaggaggagcagcagaggcggaggcggaacggaaacctgacgaggtgggggtgatgcggggtggaagaagtggaagggcgaggcatttttgaaaaaattcggtggggcccacctcgccacgctcgcacgctcccctgcgatttcttttcggttttttaattggagcggagacaaaacggaaaattttgaacgagagaaattggatttgaatccaacaaaggcgtgttgatttttgtttgggctgttgtgccgctgtgggctgtttgttccccgaatgggctgaatttgttggattggttttgtaagtcatcgattcgtggaataagttcactctaggtccctctatttgtcaccctcaaaaccgggtacaacccgtccctcaacttatgaaaaccgggcaaacgaggtccctcggaggttttgagggtggttttggctgacgtggcgcctacgtggcttgtttaactagttctccgtcccacgtggcattgacgtggcgcttacgtggcattatatcttgaaaaattaataaaaaaacatgggaccacctgtcagcggcacaaatttttttttaaaaaagcgggcccacgtgggccgacaagtcagataataaatatggtgggcccacataggccccacatgtcatcctcagcccccctctcttcttcctcctctctccccatctccctctcttcaactctctctctctcccctttcctctcgtggcggagaggcagcggcgctcgccgcgcggcggccggcgggagaggaaggggcggcgggaggtggccctgactgccgcagccgttgagcccacagggcgtcacgctttgtcggcgagcgcgcagaggagcgtcgacccggcggcgggggagcggccgcgtcgtcgtcgtcgggtgcgtcgtcatccgcggtagcgccgccgaggcaagcggagctgctggtgcggtggctactgcagccagccgacttcctccaccgatgaagcgtcgacatccgccaggctccgcggccacagggtgtccccatcgtcggggggatgggcccctcgccggcgcccgcctctccacctgccgaccctgagctcctccgcctacgccgctgccagtcgctggatctcctccatcctctgctccaagccgttgtcgggtggccgaatcccctccgagcctggccgatggggcctcgcctcctgctgttcgccggggcaccgaggacgacgctcgtcaccggcctttgctccactccacagctggtcgccaccgtcgaccttcgctcggccgggcgcggtccactcctgcgtcggcacggcgggagcgggagcggcaacaggggaaccaccttaccccgagcggccacggcgggtcagggaggtgggcagtgccgccggtggccgggctgcggcggcggttggggtcgtgtcgtcgccttgtcggtgagtgccggcgggcgcgggctacgaggatgcggtggaacagggcggtggaggaaaagtgggggagagaacgacatgtggggcccacgtgggccccacctttttataatttttatgtgaaactgacatgtggggcccacgtgggccccacctttttataatttttatgtgaaactgacatgtggggcccacgtgggccccaccttttttataatttctatgtgaaactgacatgtgggtcctgcgaggtttatttatttttcgggttgaaaattgccacgtaagcgccacgtcaattccacgtgggacagagacctagtcaaacaagccacgtagatgccacgtcatccaaaaccgccttcaaaaccgccgagggacctcgtttgcccggttttcgtaagttgggggacgggtcgtacccggttttgcggtcaagggacgaaaatcggactaggcgacaaatagagggacccaaagtgaacttattcctcgattcgtggatttggtacaaattgaattttgtagactaaaatcaagtggtatattatctctttttggtacaaatgttgacaaaccatcactttattatagtcttagcatctctgactccaagaaattttggagcaagatacataacatgctataaaaggcttatgcttatttggtatcaaacacacatctaaaagtgaaaaaaaaagagaaagtaggaaaccgccaatacttccgatcaaatcatcacaattacaagggttgtaaaatgacttttaacctactttatcgttacatatataacataatttactattttactcgaataagcgtatctcaactgggtaggtttttggtgatgaaacctatccaccgaattcaactcgtagacttgacacaagtgctcatatttatgactaattattctttcagtgatagacgatctacccatcaagtgcaaggtgcctcttatctcttgtggcttataccagtccaatctttgaaaggaaatgtccgtgatggactttatcaatctcaaaacatgttggttcaatcttcagagatgttcatagagatagggtgtgccatctattcatagaggtgagtgtgtgcatgtttgtgggcgtctacgttatactgctttttgaaaaaaaaagaatgtaatactccatgtattcatccgtttcatattataattagcagtaaaacttatttaagattgactaagtttctgaagacgtatagtaacatctacaacatcaaattagttccattaaatttaatattaaataaatactttgataaaatatttggtttgtgtaaaaaatattgctatgtttttttataaaattagttaaacctagaaaatttgacttaaagaaaaaaaaatcaaaggaacccgtaagaaacggagggagtaatatttttacaccatgagactaaagttttgagttatgatgtggcttcatcacggccttaggatggaaaatcaagggctagaacgcagcacaaaaatcactgcggccaaggcggaaaactagcggtgtcactgcggccggcgaaggcggaaaaagctctcaaccaaaaccgcaaaacccttatccctcctctcctttccttccccccaaccctagctccacctccacctccagccatggcgggcaattgatggtaagcaccgcgacggaatgttcgcagccggcgactcagcgttgttctgtgagttttttaggaaaaacaagtaggaaatgaaaggttcaatcatttagtggttgtacttctggtcagacaacacctatatattgcaacccgggatttaaaggggttgtaaaccgggactagagagcccttccccagtagtgtattgttcttcgtggtggcgcagaccaggtatttactatgacttatcttcttatatatttagccaattctacgaaaccgaggatttaccgtattcaagttgtttgcattgtcatgctatttcatcgaggaagctgaaagaagtctacatggtgccatcattattgtgagtagagctgtcaagaacccaacagttgtgcctggtggtggtgctatggacgtatgccaacttgtcaagattaatggttccatctgtcaagatgtagtaagctgatgttgcagttctattttttgttagatggaagtaagcaagtatctccgacgacatgcaaggacgatagttgtgaagtctcaatttttcgtacattcatttgctaaagcccttgaggtatactcgttctctttctcgcgcgcgcgcaactatttgtaatttggtatctgatcagagatttttttactgtccttgagcctgtgcagtaccagatcctcgctgtccatctagcccaatccaatggctgagacagcctctataccgcgtggtactgtagaatcgatagatgcggtaccatgagtgggagggtatttttgtctttctccccgcatcgcacgcatcttgcacgttgatctcctagccgtcgcacctgagcggctgcatcggcatcggcaccagcgccgccgtggtgcctcgcatgcagctactagcaccacgggagccgctgccgcacgggcccctgctgttggtcgcaaagacggccaggaactcctcgtcaagcaggcgaggtcacagttggcgtcatcttcgtcttcgggcctgtttggcacagctccagctctagctccacccctcctggagctggagctcagccaaacagtttcagctccaccaaaactgggagtggagttgggtggagctctctcacaaaatacactagagttgtggagctgggtttaggcagctccacaactccactccagacttaactcctggagttaaatttaggagttggagctgtaccaaacaggtccttcgttggggccacaacgaacagcgaatagcaaacagaaccggcgcgaggtcgcgatggaaggggatggaacagcgtccgatggaaagtccttttcaatttttcatagctctttgtccctgttcctgattattgattttggtttctgtcagtaaatttgacagccaaccgatgaactgtcgattaattgttcggttgtgtccacgtatacatcacttttttttgcaaccttacacatatacctcacattttctcaaacacgttactggacatttaacttctcgctcattcaaaatgaactcgtcagccgtcataccggttattccaagacaacttcatggcagtgctggattcactgtttctccctaagtagcaaggacttccattcactgttttaatcaactcgactaaaaccttcctaactatcatgatagtgctggattccagattcgatctctcaacctgctcatatttcacctggattaaataaagggttgaaaaaatatctagcttatcctatcttaatacaattggatggctaactccttctagccatcccaacaattttttttaagtaaaaccatagtatcgattttggtatgcactcgaaaaatgatagtggtaaccttcctaacttgcctcttatgctgtagttatttcagtaaggtgatgaaaaattcttgtcaaacagattaactatccccggatcacctttgaacaacatggttttccgcgtggaatttcattgtttgtagcaatgtctttatcctggttctgtcccgtattcaaaaccaattcctgcccatacttcaacatttaatattgactaacataatacatccctccttagtacttcacccatttcataatattcatatggatgtggaaaatccatatgaatattagtgaatctagacatacaaccatataaatatgaaaaatattacaatgacttagttcttcttatacaaggcgaagcaagctgctagcgcgacggctggaccgtggtgattctggtgaaggtgccatgcgaggtcgcggtcggcggggcacgcgcaggcggtaattctgccagcatcttttggggtttctttgtgcggcatcctgcattacttctatctttaaaaaaatctatttttttacattttttttacaaaattctaagagcaagtttaatagtgtagcccactattagctccaatacatctatagctgatctaatagcctattcatacaatagttgcttactatactattaacatatggtcccacctgtcatacacgtattatgttttggagtccgtgctgcagctggctacagatctgtagcctgctgctcttctctattatcttttatatcattaaaatatgtttatagctggctaatagtctgctattgtacctgctctaaacatagcatatgctcatattcatggataaataagcccaaattcatgtataagagttattcttttataaagggtacaaccttccagtttttctctgccaaatgccagagtttttgttcttgggccgtgtttagctctaaacttttttttaaaacttccaattttttcatcacatcaaaactttcctacacacataaactttcaattttcccatcatattgttctaattttaaccaaacttccaattttgatgtgaaaaacacagccttggtaaccaataagctagccatccttattgtatactccatccgtccaaaaaaaaaaagtccaattctagatatgtgactagattcatctatagaattagactttttgggacggatggggtattttgtagttggtgacagttgtgatacagtagctgtcggcacggatccgcacaaatcatgctcccctgccgtcagtaccactcagtttcattgtccattttaacacccgacacctgtgctaattctgggaccatgttgatgctggtgtgggctcccatcggatggactattcaactaaagaaaaagccaaaatttaaattttcaaactaaattttgacattgattttgagatatttttaacgtagtttctttttcagcattgacttttaaggcactccgaacacatatataaaagttttacctataaatttatttttattctattgcaggggcggcgcacgcgggtgggcgcggtcggcggccggcagtggacgagctgtctaggcttaggggattgttttttttttcaatttcagatctagagttgaatgctagccaaacacttagcttgttcccaactcccactggagtacgagtttagagttagaagttagagtttggagccctaccaaacggggccttaactattgtgattaggatcgtcttactaacgatgcatgctctcttatgacacatgttactactagtcattctgtgaaacttcagggctttcgactatgctctctcttcagtcttagtggttctaaaatccattatcacttagggtcatctatggtcattagctggcgttgcttcttttgggattttcttgggagggtagtgtgattttgcctccttcctgctgattggagttatgtttagcggtcgtagtagtctctttctttttttcttggtctggtcgatttagttgtgtaaacaaatactcttttcttttaatttattaatgttcttctaatatattaacgtgtaatttttttacgtgttcgcggaaattttatggtgaagacagaaagctaaagctagagatggaatctagcaagataagtgaacgtgcttaacaggatgcatttggtgacacgcagtgctcgtactccatagcacattgtttttgacgtgtgaccatttctttgcctcgtccatggattctacgtgttgctgtataggagaattcccatgcccatcaccatctcgttttctagagtgcacggcaaaaccgaaccaacttgcatataaatgcattaccatcggtgtatgctgactgcgttcggtaggcatgcacgatgcgcggtcttctttttgtcaatggatgcggtagtatattaggtcctggttttttcggctcacatattatgtaccagtgttatcaccggcatattttctaagctgcttaatggtactctttttgtttcatattaagtctttttgattttttttctttgttaaacttctttaggtttgactaaatctatagaaaaaaatagcaacatctacacacaccaaatttgtttattaaatagtgttgaatatattttcatgatatgtttgttttgtgttaaaaatattattgtatttttctataaacttgatcaaatttaaaagtatttgactagaaaaaaagtcaaaatggcttacaatatgaaaaaggagggagtatatttttttagaaaatcttttcttcatcagcacatttaggaaacggttttaaaatcaaatttttaatatttcgtacattcgcctctgttatagatatcttgaattattatttataaaccaattttacccctcatctataaagaaagaaccggacaattgtggaactgtggactggagtacaaccaaactgaaatagcgtttcgttcacaaatattgctagctatttaaatacaaaataataatttgtcgtggaacacgcatcatttttgcaaacaaatggaaagggaaattttgtatttatatgtagttgtgtaacatgccacctactccctctgtccaagcataccaagcattcggaatttatctgtaaatacaaacatttcaatttgcatctcatttttttccctcatcttaccctaaatcatcctatcattcaatccatataacgagggacaccaaatgttttttcttgcttaacctcaggtgttgttattttctgattaacatacatattttacctcaatttttgttagcatgtttttcagtttagcatgttctgtgcaaaaacttggctttaaaatatcaaataaatctatttttcaagtttataataattaaaactcaactaattaagtgctgatggctatcttgtattatgtgtgccaacttcattttcacctcaacatcactttaatctctactattaaccaaaatatgcctgtactacctccttttttttaatgtataactctagtaacttttcttataacacttaaccgttcgtcttattaaaaaaatagtataaatatataaaagtataagttaatattataatttcttggtaatcaaacaagtcacaaaacaaataaactgtatttatgtatttctttatttttaaataagataaacagtcaaactccatataaaagttaacgatgttatatattaaaaaaacaaatatagtatttgtagacaaaatgagtataaacttgtagctctcgttcgagctccaaatcaaaaaagctcccataaagccataccgctcgcggataccgcctctagttcgtcacctcgattagccccagatcccaagaaaagaacaaagcgatccgctccctcgcctcgccgcggcattttcacaagcaccctccgcgcgccgcgccgcgccgccgccgccgccgccgacaccgtcgcgagagggggtagggggggatgggctcgctccccgtgtcgtcgccggaatgcgcgccggggcggcgggtgacggtggcggcgtcggacctggcgccgctgttcggggcgcagcggcggcacctggaccacttcttcgaccggctcgacctctcgcaggcggcggcgttcgcgcaggcgctggtcgacgcccccggcgcggtgttcttcacgggcgtcggcaagtccgggatcgtggcgcggaagctggcgcagacgctggcgtcgctcgggttcacccgcgcggggttcctgtcccccgtcgacgcgctccacggcgacatcggctcggtcttccccggcgacctcctcgtcctgctctccaagtccggcgcctccgacgagctcctcgccctcgcgccctgcgcccgcgccaagggcgcccacctcatctccctcacctccgccgcatccggcgccgactgcccgctcgccgccgtgtgcgatctcaacgtgcaccttccgctgcaggccgaggtgtgccccttcggcctcgctccggtgacctccaccgccatacagatggtgttcggcgacaccgtcgtcgccgccatcatggaggctcgccgcctctccagggaccagtacgcctccaaccaccccgccggcaagattggcaaatccctcatcttcaaggtaaacctaattgcaaagctacattgccgtcatttcttgcattagcaaattgattattactacaaatttagtacattagttagatctcaaaacttactgatactaagatcttttactttatgagttgcttgtcggtgcgatcagttatgcgatttttccagggtggaatgttgaactcataataaaggcagaacgtgctggttatgacagcatttctgtcactatccaaacaacattttatttctttttgtagttactcgtcagagtctttttcattaggacactcaggttgcaatgaataggagtccttattcacaggtcattttcacagtatttgcagccatggcagaagatgctggatgacacctttttttttgggcatgattcttgatggttagcttgtggaagttatggttgctattttttctcatgagtgctaattaccagtaaatttgagtcattttatccttgaattattgtaagaaaatgatcaattatttccttgtatagatctttggaatgtttttgtcctaggagcctatttgggtatggcacatttggatccaattccacaggatttaatttaaatttgaactgaaacccaaagattccaaacaccctagtcaaatcatgacaaaatttcactatgcaggttaaggatgttatgaagaagcaaaatgagcttccattgtgcaaggagggagatatgatcatggatcaactcactgaactcactagtaaaggctgtgggtgtctacttgtggttgatgatgagtaccatttgatcggaactttcactgatggtgatctccggcgtacactcaaggcaagtgggcaagcaattttcaatctgacagttggagagatgtgcaacaggtttgtctatgctcagtctttatgatttattagtcctttatggtaaaaataaggttttagataactcgtacagaaccaaaagcaccatacaactggttttcctactatctattcttagttttagttttgttttcttaaattattgtgcttctctaatcttcaaagtcattttaagtgctctttttggaggcaataacctgaaaaatggcaagctgagccatagcgtccatggttgggcgcctgggccataaggaacttaaaaaattatatcaagtgctagaacgcacataaaagatcatgataagggactcctcttttctttcccttatcttttaacatgtggttttcctgaaaataacacagatcaatttactgaaagttatctttgtattattaagctacaaaggtggtgacatttctccaaagagttgtggttcttaaaaaatatacccaaactgtgctctcttggcaacattcatttatagttccagcaggtctatagaaatgttagcatccaagaattaagataagttttcagcgagagttggttagtgagtgattttttgacagttaatttcctttttcagggctagttttggtttttttgctctcctattcactgatcacatccttgtgttttgcacaatttcatctaattttatcgtcggtgccccctaaaagaattccgctctgatgttatatggttcacaagatctgttgggctgctcaataatgtatttcctgatactgcggcgtgttgttataagatctggtgacagaattttgtcagttctctgtttgcccaataaagggctacagctatcaactaattatgtcaagaaacttttattgagatgacagttcagtctatagagctgtgctggtacaactcttgttgtagaagcattggccaactgatgtatttaggagagtagttgtcaacttgggaccaatggtaaatttcatttttgagtgattgaaggcaagcaaaggtcagttgagtctacgtcgagttgagagcactgttgtctgttgattctaacgtcggtgatagaggcaaatgctacgtgtagaattcagaatcgtttggaagtaatcgttcttacaaatctttctggaatcagttttgaccatgatatatagccttcctcttaagtctaaacatgtttgttgatctttcaggcacccaagaacaatcaccgctgatgcaatggcagtacaggccatggagaagatggaatcgcccccttctccggtgcagttcttgccagttgttgatagcaacaacgttgtctgtgggatcatcacattgcacggattggtctcagctggactataatcttttcgcctcatctccttgcgattctttgcaagtatttggtccagtacatcatcacgctggttgcatggattcttgtcaaatggtgacgccttatctttgtactagtacgtgtagcctagagtgttaaagaggcattgtttaccagtgtctcctacgtctagtgttctaaaagagcaatgtgacagttgctcgctggatgaatgtacccttccctctgtaaatgaatgtgagtttaagatgcagtggaataaaaagtttaagcctaaacaagcagacatgttatttggtttagctttttaaagccataaaccactcctacactgttaagccaaaaactacgtttgagtagttttgcaagactccaccattttgcaaataacataagtcacattcaaaaggaaatgaatgtgagtttaagatgcagtggaataaaaagtttgagccttaacaaacagatatgttttttgtttagctttttaaagccataaccactcaactacgtttgagtagttttgtaagactccaccattttgcaaataacataagtcacacattcaaaaggcacaaggtgtcaaacgcaatgcatagctaactggagtagaattttgcaactagtaggcctggtgaagttcaaacatgcattgaacaaacacaacccttcatggtgtgctcaatctgtgacattcgatctttagctccatgaatctaatagatatctcctaattcgatttcgtggagaaagtgcaacagcatccaaattttggtagcgatgatgttcaaatccctccatgctgctggtgcctacaagggagcttcacctttcccactctgaatctgggtgtgggcgctccaccctgggcttgctagctggtgatggacttggctggtgattagtcaaggcctggtcccagcccaagatgtgcggcaatgcgaactgcacatacacacactaatcaaccacaaaaacacatggaagaagccctaagcagaatctttttaagataatggattcaaaacctggcagctacaattacatacctaaccaaatataattacaaggaagaaatatgttatatgtatatagcagcctcaagtggcttgtcgtggcaatgagtgctgccaatgtcattactatgatatgataaatgaacaatgccaccgagtagtgtgtcattgccaatgaagcggtagcatagagctgcttaacataatgcatgcatgattccgctaatgagtaaggactaaaccatctggtaatgttgatacagtaaaattagaatatacataacacattcacaatgacattaatactgaagcaacaacagaggcaatagacataaggtttttattaacttgtttaaatgaagctctgatgtatgccacgaaactggtactatacactggcatgaactgtttcaatataaagctatgataaaaacagtagtgcacctaatttattgatgtctttaagcttagctacatattgactaactggacaaaattatagtttagcaacagatttcaaatggcaatttggaaacttacactcaatgctgtgcgcataactgtaaactcagcttttgagattgggagtgaaagtcgctcagttgtcttctgcaagttgttcagaacagctgcaaagaagattctgtgatgtatctgtcactgaaaccatggtgtacaagttgataactggctattaagcaggaataacttcttgtactcttttcatttcaggcagtcattttaagagttcgcaatgaaaaccaagtcaatagtcaagacaggcataactttaaccacataaactgcagtgttggttattatacaagttttaatcactcagtcaactttagatcctgttaggtattatagctgagggttgccacaggcacatgccatagcttaatattccgccatgctaaatgtcaactaatcacagacataaaattcttatgaaagagaactagtataacgactccatggtcaatagttgttcatgatgaaagtgtttgtggtagccactagccagaatgcctgcaacactggatagtggatacaccctttagcacacaatataattataatgtaattacacaggcattccaaaaatgctaacagaacatctcaagatgtcaaccgattgatcaaatcatcaaatgatatttgaccaatttgaccaatggcaatgtcacaaatgaacataagaaacaggggtatactggtaataaaataaagcatgtttgatacgttactaaagccacttacttatattcagaaagtatccactgtcattgccgagaggagtgactgacaacgattttttcacttggccttcatgactgacaaaagtgaagagggtaaggttagaaggccatgacttcaaagcataaagcatctacaaacagtacgtttgttacaaagttataaacaaaccttgatttcatggagggatcatggaaaaattcacaagattcagcaggcccaagacttatcaagcttccgacttcagtaggtgacagagcaaagagctgtagaatagatgtcgcagataaacaaagttaatagaacttagttttagagagaaacaaagagcaatctggtcactactcctgtatggagcgtaaaaacccacaaagtgtagagcagaagtgacaaaactcaaaaaaagaaaaaaaaaatcaagcagtctttattaccagatatgatcctatgatcatcactacaaaaaggctccctccctctcatgactaaagtgagattgagcacatacagttaaatcatgtgtaccaattaacttggtagctggtgcattatttgtagcaagcatcatgcaaactcatttatattgcattagatgcttataaaattgcatattttcttgagtgaaccaacatataaagtattggcaatagccaataggctatggatctacgctgctttggttttcataaataaatttcttccatatgaatttgacattatttcatcccaatatggatacaatgttgatgtgactagcgattatcagtgggtaggcatattttattgccaggaaatatcaagtactcaagaaatatcattacctgtttctttgaataatcatatttcctttgtcccacagccgggaaaaaagtcaacatcaccgatccatttttgttcacacgagatcctccagactgatgaaataggaaaattagatagtgcaaatttggaattgtatgttagaacacaaacaaataaaaatgtgcatacttccagtttgctgaagcttggcagtatgggttgcatagaaagtgcagcctttcccttgaacacggtgtagcttgcaaattttctaccagatgtgttctctgcataaagatagtaaacaatatgtttattagtatgtacacttttgataaaattagcaactttgactaaagtgtataaaggaaaaagtcttcaccgtctgctgcaaatgttgaaagagcatgttggaaagtcaaagaaccactccagagagcatcctttaggtcagtgactctcctgagaagggggaatacacttattggagcaggtggaaagaacagaaccataacacaacaaaggattgacttgaagataccattgtaagattggttggccgtactacttaaattgccattcactatatacattaattactacgcgagaaaaaatgaactacagaaaacaaattaaccaactaaaccagcatgaacttgatcagctccaaacaggatgctaagttgcagcacagccttgaattttccaattgcatgtccagcagcactgcattcgatcgttactaaactttactgtaagaatctcgcaaatagtattgttacgtcaacacaacaggttcgatttgtgtctgggaacaagagatcagtattattcacgcacaacttgtaacaacaaaataagtaaataacaatcagctcagcaccaccgaccgattcatcactacccaaacacgggtcccgtgggtcaaacggggatacaagtgactgggaaagtacaccgctgacactctgcgcaactggagcaaaaccataatataatctcctaaaacatctacaacgtaattaacacataaaaacccatggcgaagtaaaacgggggaggaaaaaaaaacacacaggccctaaccctatcgccaaacccccaaaaccccaccccgtttcaccgtcgattgcacaaggcacaccgaactaggagagagagaccaccaaacacgaaccctaagatcaacgaaccggtcggcaccacgagtcccagacgaggccgcccctccacaatcgcacaaacggatgcaccaatgtcgccgccgccgcggctagggcggccgagagagcgagcgcgcgagcgctagggtttaagctagggtttagggtttaggcggagactgacctggaggaggaggggacgaagcgggagaggcgctgcatcgttggccttggctttccgccgccgtcgcgttgcccaccgagaagcggatgccgaatggaatgggagaagaggaaaaaagcagcagggaacgcgccgcttgtctcgggaagccagccgcatcggtggcggcgcttgcgggcctggcaggtgggccagcccacggcccaatccggcctccccggcccaacagccattaacgagtgggccatgtctcacaactcactattactccctctaccaaaatataagttttttttattgatatagtattcgagatactattttgaccaataatatcagatgttttaaataaaaagagttgcatattactccatccatcctaaaatatttgacgtcgttgacttttttaatcatgtttgaccgttcgttttattcaaaaaatttaaatattttttaattcttttcctatcatttgattcattgttaaatatacttttatgtatacatatagttttatatatttcataaaaaattttgaataagacgaacggtcaaacatgtttaaaaaagtcaacggcgtcaaacattttgggacggagggagtatgatagtttgtttaataataaatctagtaacattaattttacatgattaatcttttttattattttactgttaatggtcaatgttaaaaatatttgacttgtcactatgctaaaaatgtgtatatttttgtacggaggtaatactatttttttaaaaaaaaaactttagcgatgatgatgacagatatcaagtttttggagaacaatgtggtatgtgaagttgaaaactttgaagtagtttgcatatattgatagttacctcaagagttttatttgcaagaatttttcagtttcgcggggaaaaagtttttaaaagtcgggttcagttcttgaatatgaactggaaaatgcatgtttgtccacttgtccttgctgctgtatggcagctaattccggtttatgtttgctctaatttacaaattacattcatctctcgagaccgatttcgtgctcaatttcgcgtgcatgaataagatataattcatggaggcgacgatcaaatacacagcaagaagtcgagaagagatcggggaaaaaaagacggcggattcgtggctatggctagtagtgaattgatcactaagcttagttggccttcttggtggtggcgccggcggcgccgccgcagaaggcgtcccggttggcggcggcgccgccgcggacgaggaagtggccgagcgacggcgtggcggtggcctccacgcggttctccgggcacaggaactccctcgcgcacgcgatctccacctcccgctggtagtcgtgcaccagcacctccgtctccgaccccttggtcctcgccatcaccgccgccgagaagatcgccgacatcctccccggcgacccctccgtgaacctacacacatccaacatgacatcatcagtgttaaaatataaagtgaaattgttcgtccttgctcaccagcttaagttcctaagagcaagtttaatagtacatcccactactagcttcaattcatctatagccaattcatacaataattgcttattatactgttagtatatggtcccacctatcatacacacattgcgtcttggagtctgtgctgcagctggctacatatctatagcccgctgctcttctctctcatcttttatctcattaaaatatgtttgtagctggctaatagcctgctattgtgcatgctctaactaaacagatcagtacatatcagaaccagatatctcgtaatcgaatcctagttagcgcacgctagaggcttaagggagagggttggaatataaaataaaaaaatgctatcgataaatgttcaatttcaaaaaatatcatcatacaagccatcatacgagggacttttttttttcagaaatatcatcttaattagggttttgttagcagtcttccgttaagatggatgatatttcttggatatgagtgtttttcaatgatattttttagattttctgtaaaataaattgtttgtcttttctcatcggcttatggttaaaatgatcggtgcatacaactcaataagcaacattatcttttttttaaaaaaaagcagcagcatccatggccgcacattatgcaaggcgagatggacacggaggtagtaggtgtttgtttgctcttacccgcttgggccatcgacgaggatgacgtcccaggagacgtcgtagagctggttggggaggtcgttgatggcgaggcggcagtcggagaagaggaggttctggacggggcggcagtcggcggactgggcggcgcgggcggcgtcgaggaggtcggggaactcgcggacggcggtggcgtacgagacgtcgtacgcctccaggcccgggagcgcgccctccacgtgcgccacgtagaacgggttctcgtccaggaacaccgtccgcccgccgtggttcagcgcgcgccacagcggcgtctcggcgccgaggccgaacaccagcagcctgcacggcgcgcgccgccggagcaccgacgcgatcgcccgcacgtcctcctccggcatgctcgccgtcgcgttcgcccccgccgccgccgcgtactgcaccagcgcgtcgaacacgtacgccggcagcccgcccgctgctcccaccgccgccgacgccgcggcggcgcccgccgcgcccgcgacggtgagcctcgcgcgctgcggcagcgctgcgccttccgacgcggcgcgcgccgtggagaagacggtgagcagggacacgcaggtgagcagcgcgaggaggagcgcgacgagccaggcgcagcaacgccgccgcgagccgaggaacaacggcatggacgccgccgacggccccggcgacgccgcgccggacagcgacaccacgccgttgtaccccttcgacgccgggtgcacgacgagcagcttcggcccggacatccccttcatctccttcctcctctcgccgccgccgccaccgccgcaattcttggctcctcttcttcttcctccttgcctcactgacacacaaactgtctgagcttgtgttcttgagtgagtacttggagtgaaggatagttgcatataattatctggagcttgtgttcttttgtgtttagtagatgaggtgatgaggaaggaagaatggttcaccagacctgactgacatttcaggttggaagaaagatggaggttgggatggatgggatatagaggcaacaaagcctagatagcttaattaagcaaagtaaaataagctttgtgatggattagtagtagttggcaatgtttggcaagaaagcaagctagttaaaaaggaattcctgcaagtttgcttcaaagtggatcaaacaattttcttgggttttaatggcactcctgtgatttggacacaggagctttctttctcagaagaagactaatagcaaagtccataagatatcacattggcctctaaattagctattcaactgaactgaactagagtgtgttaaagagaacatatttgcctctaaattatcaatccataaagcttcatcaggaaagaagtgaggacccatgagttttcagtatgaagcacacaatgccaatattccaatcagccgatgatgggaaacatcattaattgattgagaagctgcagaagatggctccatatttttgaaggaaatcagctatcagacatcgaacacaaaaagtcgcaaaaagaccaatatcatgtttggtgagaaaacacattgttgaagaaaagaagactgaacaccctctgacaagggtcctcagctgggaagatgctatcagtgaacacttggaatataagccacagctgtggcaggaactaaagtttgtggatgggaggtgcctgtccatgagccatcttatttttttgttgccttcaagtgaagcctcggcaagaaaccaaaaagaaataaagaaaatggcatggaacacaataagcacactgagaatcatctgcagccctgaaatgcctcaagcttattggagccaatttcaagatattactagcagttgtttaatgcggtaacaaccacatgtgaaaaaaaatggcatgatcattggctctcttaaacaaaggatttagttggcaaagagtaaacataaagtgaagcttaacatttagggcatggtagcaggtatgatagcagagttttacctatggagtcttggtatataagaaggaaccttacctgcttatggatacttcactacgaacaatggctggaaaacttagccgaaaaggggcacagcatcatttgcttactccagtacccgttttctcccttgtctaagtcgactgaatgagaatctgataaacatgagaagcagacaacaatggcaaacaggcaaacatatagagatttttttccacttcaccagcaaaaaagtacaggatgaacagattacagggatatggcaagctttatccacacaatgtccaacattggcaatgctcttgcctcggtgtaacagaagatcaaaatctcacgggtaccatgatcattgactggggtggccacaggtataattatgggcatcgccaggatcatgcagtcccgcaccagtaggccaggtgctcatctttgcgcgaggtgctaaacagcccaccacatttcaagcaaatgaagctgctgccgtcagcaaaagcatctaaaattatctgcttccttccactctcagcaagtatgcagacttcatcagaatccagcatcatgacagggtcagagccaggtacttgttgaggattagtgtttgttgactgcgactctgctatagcacattgtgcaagcaaagaagcgagatcatcaacactagggctgggctgtgatctttgcctgtagagttcccgtgcacggttcagcgtctgcatgagagcctgttcaccaccttgggatcttatggccaagagaatctgcatgattttggaagttgaaaatcaatagaaggagattaattgagttaacagaattagaaaaggtttgatacgcaggctaaaatttatgacctcgtttctacagagaagttaggctcagacagttttagctgtcatcatgaaatgtttcagcgaatgtggaaaagagatcaggaatgtactgactcagtaattaacaagtatcagcacacatatcaacggacaggacaatgaaattgaaacggaagtacctaaaaataatcaaaactgcaacagagcattgaaaaattaaaccgatttattgattagcttactatttctgttatcttaaattcaattcatcagcaaaagtgaacattgtgagacgtatgcatcaataccagtcatgtaatctagtcaccttcttctcattcatgtcttacgtcatagcaagtatgttatacatctcaagaaggtttaaatggccatctgtgactagcagagtaatcattactcaatgtatatgcatatgagttaggaaactaaaatattcagtgtagaacctaatacatcggataaaaaggctaagatgcatcaagaggctattcttgaatttagatcatgctccagatcatgatatgcaatctgcttatgtaatatgcggtctcatggaagctcaatagttcaaacaacagggatataagtgataaactacaaactagcaaaggttatcaggtgaggtgaggaataatcccattattacaataaaaaaggcttggctgatcaaggtgaagctgtaaatctactggtgttctttttttagataatgggtaacctggcctctacatccaacgcggatgtatgcagccaatctactggtgttcttactcagacaataccaatatgtagcagactagcacccttttcatagacattcccattctcgccttaatcagatggagaaactttttagttgttctactttaggtctttagcatacaataaagagagaaaataacaaaatcatgtaacaattgggcaaaattagaaaaggagggacaaactcttaaatttagggagaaacatcggaaaaggaaatcctgcagtaaagaaaacaatcaatgtctcgaatactacaaaaattgtggtgcagttatacgggaactcaagcttgaataattgatttctcaagaatttttgtgcatttgcgcgggaaactctggccagtaggcccaacttaacattatggcacttggaaggattaagatttgcatgaacacactaaatcggttcaacttccccgcctttccatgaccgaaatatgagaactcatttgtaaatactaaattgaattactgatggtggaatcaatacaatacaacactatgagcaccaggtatactgaaacatgcatttcgctgtgaatgcatcactttgcaatcttcttctctctatttcttaagaaagatgagcataacaatacttaattctactatttgctagtctaagaaaggacataaccgaaagggataagtgcaaaagtgagaaggcagacgagcacctaacatcttctagggcggatcatacctaacagatcccaaaccccgtaccctaaataaaccctagacctagaacgaatcacaccaaaccccttttctctgtgcgcataacatcccgatttccaagctggattacgccataacgaagaccgtcataagctaaatcgaatcacatagaacaccatgaacctctaatcgaatgatgaacctctcatcccctaggtaaatccgtgacgcaaacctcgagaattccccattccagcaccgaccgagggatcgacgcgggcacagcacgcgaaatggaagcgggccgagagagagatgaagagagagagagagagagagagagagagagcctcaccgcctgcagcgcgagcgacggcttgccctcctcgagcaggactcgggcgcgggacagcatgctccacccatcccctctcgccgccgccgccgccgcagcagccggcggcggagcctgctcggccatcggctccccctccgcggcctccatctcgacgtcgtacgggtccatctcccacgcctcgatctcgcgccctctctgcctcactcactcccgatcgacgggtcgccgccggtaggcgggtgcacggcggcggcggcgggatgcggctccggatgattccaggagttcgtgagtgctggggcggctgctttattggagaagaggcgaactgaaacggaaactgctgccagccgtccctctcttttctcttgtggctgctatgatgatgcgggtttccaccctttttcgtgcgatgttgggagttcgaaatttcagataggcgaatttattgaattttcgaagcatgaaattgactcaaataagttcatccttttgaaaatatggagcagttatgaatatgacttatcacgatgacgggcatgactatcttatgactataaatcacactgacttgttgattgattgtatgtcattacacctatgggttaaatgaggactcacaaaattaaactatatcaaaaacacaatatcctcgacaagtttatgctttatacacacttatacaaataggatgaagatattgtttcattccgtgtctaagtgtgaagccttgtcattactcataaattatatttattggtccctttacatcatataattgtcacatttatccttttcgtaaaaggtatacccacgcactaagagccagcggcgaaacacaacgtgtgtgtgagggggaggggagggggacagggaagggagggcttgagcttccctaccctgctgaatcaccatcgagagaaagatgagaggggagtggaattattagggtgaggcagaggagtacaggagctggagaaggaagaaggaaatgaactccctccattcactttatatatctatctctgctagcggatatttcatgtgaaggctagggaacacttaggccaccgtgcaaatggcctcaagtatgtgaagacacacgcaagaccacacaccttgtatggataaaatcaccataccacattgtatcgctgtatcgttggtagacggtgctaggtggagcaactatcccttgtcaagggccacgggacctcgcggaagagcgacattcaacaacacggtgcaagcaaaccatacgacacgtttggcactttatgactatccttatagagatgtcaagctatgcgatatatggatcttgtcattcacctaagcatctcatatgtttttcttggttaatgttgtatatttttggagcttctgtatgataactagtgacaaattaatgtatacacaaaatttaaatcctccataatttttaattttttgaatgacgacatgatcttcaaaacatatccttcactacggttttaattataatatataaaaagtaattattttaaatttctaaagtacttttaaaaaccaatctatactctgtgctcaactgtcttaaattaaatattgtaaaaattattgatactaaaaaattatattgtttgaatttgattttgttaaaaacatcagatataatggaactggagggagtatgcaagaggtttatattacatttcataccattctaaacacaatagcaagtactagtaaccatgttcgatatctgcggagataatttactcaaaattctcgctgctcaaattaacaactcaagtttcgaaggaagaaaaagaaaaacatatgctctcgtccttgggccttggctgccacttgtgctacgaacagagtcacaaagtccgtccgcggcaagcgtcactactcttatgtacccacagggacggcggcagcatcaccggcgaacaaacagctcaccccgccacggcccacgccggcgccagcgccgccaccgtcatcgaggagcgccgcgctagacctcgtcggcgggcgctgggcgatgtatccggattccggcgatcgagcttggcgctgatggcatccatggcgccgtccatcgccgccgatcccctctctcgccggcgacacctccctgctaatcgcgacatggaaacccaacttggagcaaataatctgaccccacatgtcagtgtaactaacaggccaagttcatgggccgctcggtcacatgggccactctactacgtgggctctacgaagtatttaggcccaagcggtgggaagtagcagcgcaggttgccgccgcttggttttgctgggagagtttagtaccacctcgcccgttcagctagttgaggcggtcgcggaagctataaaacgaggcggagggctccgtcccaaagcatacctttctcggccttttggctaagatcaagtgtagtatctgttcttatcagtttaatatctgatatgtgggccatgtgcccacttcgatattaaatttattttttgtgggggagggcccactacagtggcttgccactggggtcctcgcgtgtcgcccaggcgttgcactacagcctgggcctggcgcaccccaaccaaatcaaatttagaattttaatcctgtaattgaaaatttggtaaaatactccgtaatgactctaatccaaaattaaagccgttcaagtttatcggaatgcccgaaccaaatcaaatttaaaattttaatcatgtaattgaaaatttggtaaaatactccgtaatgactctaatccataattaaaaccgttcaagtttctcggaatgcccaaacctgatcatctagggcttggcatcactgtgcttttatcagaaaacttgcagccagtatatagtacgacgtgaaaaataattctattcccttgtttattttccttctatttatttttaattaattattacatcggagtgaagttctgtatttttaaaagtaaaaaataattacatcagtaatagataaagtgaaaaaaaattgttttcaagttctgtatttttaaaagtaaaaaaaaattacattagtaatagataaagtgaaaaataaattattttgataaggaggaagtagaaatgaagatgttaatgaccaaccattcttcaacccaaatatacattatttaatatttacaagagatgctaaaattatttatatattttaaaatggagggaacacaatattacaacggaattatggcggcacttaaatcttctgtgtgtcaattactaaaaaaagtatgttcaaattaatattaactcaaatttcaaggaattcaaacaaaatggagacaaaatgctgtcgtattccgaagttcatgttcccttgggccgtggcccgtggccgccacccgagagcatcacactgaacaagtaccactcccactgccggcgctgcccccaccggcggcggcagcggcggcggcggaggccatggctgagctgcggcattcgacggtggcggcggccgcggcccgctcctccaactcccccgcgaagcgcgactccgacgcctctgccgcctcctcccccttcgcctccacctcatccgcgcgcggccgcggcggcggcgacgacgacgacggcaaggatgcgcaccgctcctcccctctcctccctcatcaccacaagcgcctcggcttgccctctcccctccgctcgctcctcgccctcgaggaccccaggtccccctccgcgtcctcctcctaccggatcttgttcgccctcctcgcgttcctcctcctcgccgccaccttctccgcgacctccgtttggtcccgcctcgtgagttcctctcctcttccgaatttcggttttcatcagactcgcaacttaccaatgcttcctgtttttgatcctagaatgcgccctacttgtgccagaaggatgggatcacgctgcactgccctgaggtggagtgttcttcatctgcacacgcaaagtttcagtgaatgttggtgtgcgtcgggagatttggtctaaataatttgtttgttttgggtgcagacgaaggaagccccctccctatgggagaatccacgtgctgctaccacgtcctggaaaccctgtgcagagcgccgcagcaatgaaccatcaggcaagtccagcactcgcatcgcgataggcgacaatgcagcatcttcacatagtttaaaggagttgtaatcttcatatcaatcagtcatttatccaaaattctttgggccctgagtgaactagatggtactccgtacataatttgtcaaaccagctaaaatctgaatttccagttttattttgagattaggttgaactgtgatccgtaatttgatgctaggtcgctggtttatgagacatgatccatagttccatttcagatgattggttatgaaacggcatatggtgattttaatccgtgttaactgttacaaaaaatttcagacagaagttaggtcgagatccattgtttcatataatgtggttgatttataagaaaacatatggcatatttattccatgctaattattgagacattgcatatgagatgtgagggtaaatttaaaatgcagttcgcatccacctttttcgttgttagtgagcaatatgagtacatgggtcaaaattcataaataggatactttccttgtaaagtactttgctaggtctagttaactctatttaaacgtaagctggtctttcttcttgccatgtttcttatactgtctcttaatgattcattgcaagcaagctttcttcaaactgtgtatacacacacacttttgttttgtacaattgtgccttcaacaatcattgaacatcagtttcttgtcatgagtgactataatatatgtctatatcacgcagatgtcccacctgagaatgaaacctctggatatatttttattcatgctgagggtggactgaaccaacagcgtatagctgtatgtatgctcttctatttctcccaggcttcctctccttattttgtctcagtggttgagtgctaaatgttcgtttagatcctgcaacggtttgctgcctaagcatatatttatcacaatataataatgtataccagatctcgttatttgagaactatttatcttatgagattagttgttgcaaaaggacaattacagtagcctttcagtataatctataattcctcttgatagcatggttgcatgagtttattatgatctactaaaagctggattaagaaaaatatatgttatcttgctgtttaatactatttaatttcccctagcccacagaatgatcatacagacttcttgagcagcagtcattcgtgtcctaggatggcattgagttccagttaaagcagatggtctgcatgttaatttcactcatctcttgttttttcagatatgtaacgctgttgcaattgctaagataatgaaggcaacgcttattttgccagttctaaagcaggatcaaatatggaaagaccagacgtaagttttcaagtctagtgtcttctacttgtctgtttcccttatgatagttagtgggtagttatatgttacaaaatttgcttcgctaaatctctaatgaagtgccctgcaactcaggagtcaacacactgtccacttagaatgtgagagtttagaaatgcagaaaaaattgtgttctgccttgatttcttatttattctcataaatctaaacagttgtcttaatctttctaatgttgatgcatttatgttgaacagttcagcagctgctgtggaaaataaaattgactaacttttctgcataagtgcgcttcaaatgtagttgtttctgatacttaaaatgagcattgtagtgttgcaccctcagttattttccctgaaaaattcatgaccactgtaatgtttctgatagtatgcttacaatgaccattgtagtgttgcaccctcagtcattctccctggaaaactcataacgactgtaatataaattaatttctggctagtaaattagataaggaaacatttttattttgtgttgtcaattttaccaagctagtacatggacattaagaatccaaatcaaggttgtttttagaacatttcaatttatagtaataatcttataaccgcagaagtttgtgatacgtgcttagctggtgttaagttcaattccataatgggtactgagtcccatacctggaataattgctagttgcatagagtcatgaactcatgattttcttagttgcagtattttctgattcgtttcctttatatgcattgtgttttggcatcagtaatttttaagcacatgtatcttatgtgcaggaagtttgaagatatctttgacgtggatcattttataaactatttgaaggatgatgtgcgcattgtccgagacattcctgactggtttacagaaaaagatgagctctttactagtataaagtatgtgctacactcacacttactccttgcatttactctgaactacctttacttttggaaaatcaatgttacaacaagtgaatactgttgacaatgagcttggcaaaaccatttgctattttgctgccatcatagcattttttcatggatttggtgaaaaacctaatactacttccatgctgttatactgtaattgtcttgtatccttagctagagtcatttaagaatacatttattttatttttaaagattttattgtatactcattggaagtccagaggaccatctgaaatatatccatcaaaacagttgtttccaagatttctatcagttttcttggttgtctttgttctatctcaagatgatgggagagtacactttcatataaccgttatagaattgatattgtcatcccaaagtccaatttaaatccccactgcctacagtttagtggaaccaagtatcctgtgactatcttcttaccacgaagtgaagatctatgattaaaacgtggattatttctttttgtgagcaaaaatggttggaactgttcaaagtctttctttcactagctgctgtcctgccttgttctccctattagaatttattcgtttaccttcttaatttctcattcattgtatgcattgatcttcttgtacagtgatatatatgttagagatcaacagattgcactgtattcataccttttatttatatatatttcactgtatttcattgatctatcacaggcgtactgtgaagaacatcccaaagtatgcatctgctcagttttacattgataatgtactcccgaggatcaaagagaaaaagataatgtctattaagccatttgtcgacaggttggggtaagtcaataattgactgatgattattcatacattttattccgaaatccaaaatatcaatcaagttcaatcagctccagcacattatgaagggaacattgttccctcctttttttgctttgtagtttctgatatactacaatttaccatatctttgcatggcattgaacaaccaaagcctaacataaaaacttcaatttcaggtacgataatgtcccaatggagattaaccggctacgatgcagagttaattatcatgcactaaagttcctgcctgacattgaagaaatggctgataagctggcagcaaggatgaggaaccgaactggcagtgtaaatccgtacatgtaagctaccttagagaatacagccatctgctgcttgcccaacctaactgaagttggcaacttaagttcatttctaatcaagtgtagcactttccttttgaagggctcttcatctgagatttgagaaaggaatggtaggcctgtccttttgtgattttgctgggacgcgggaggagaaagagatgatggctgcttataggcagaaagaatggccaaggcgctataaggtcatacagagtcccagttgtctgatgagttcagtctttaaactttgtagatgtgaagcacacatgctttagcaatctaacaaattgtctctttcctgtattcccatgcagaatgggtctcacctgtggccattagctctgcaaaagagaaaagaaggccgttgccctcttgagcctggcgagatcgctatcatcctccgggcactgggttacacaagaggaacacagatatacgttgcgtcagggcaagtgtatggcggcaaaaacaggatggctcccctccgaaacatgttcccaaatttggtaagcactagacattcgcactccccttcattaaaaaaaaacaaaatactatcatggccttcatgctcctgactagtgtagcagtagtgatcactgaacacagagttagaaaagctcattctactaaccctgaaaaacatccatgaacacagagttagaaaaactcattctactgaccctgaaaaacatccatgggcctcattgaggcatgctattttggcctcatgaatgtttctagggcaactacaatgatgccgaaagggttcaatgaggacaaaatgctatcatggccttcgtgttactgactggtgaactctgaacccagaatagtcacaaatgctcattctaccgaccctgaaaaaccccaatttggtgatgtttttgggaaaaaaaaatgattgcagcttttgaagccaatttttttgccctatcaaatttttgacagctttattagtgtcatatgaacattttgtttcttatcaaattgagtattgtagtagaaaaaaatagctcaaaaccaaccaaacaatctctttgtttcgagattgaggccatgactgatcggcttgttggtgcaggtgaccaaggaggagctcgccagcgcggcggagatggcgccgttccggaagcacgtgacgagcctggcggcgctggacttcctggtgtgcctgaggtcggacgcgttcgtcatgacccacggcggcaacttcgccaagctcatcatgggggcccgccgctacgggggccgccaccggctcaagtccatcaagcccgacaagggcctcatgtccaagtccctcggcgacccacacatgggctgggccgccttctccgacgacgtcgtcatcacccaccagaccagggccgggctgcccgagcccactttccccaactacgacctctgggagaatcctctcactccctgcatgtgtcctacagcctgaacccccctgatgaatcttcaggcttgaaagttcaattatacagttaggatcactggcagtatagtgctagaacattttatgttcttgttttttcgttttcgtttttttttttgctcacgtagtcctattactagcaggatttaccacctcgattggtcagcgaaattcgagccccagcgaagcgtactcttttgctaattttgaacaaactttaacatatttcgaatgaattatgacctgagatgaacgttttgagccagctcatggtgatagaagtccgcggattttgcttaaaaaatcgtcgagatcatgaatcaaggtgttttttttttcctgaaaactatgaaagattaggtaaactacggtcagtaagctaagattaagagaatcagttgattgataatcaacttctaagaaaactaaacttttcagtttttatcttttattttatttactagattctatagctaaaaagttcttaaaatctggataattataagaaaaactacgagtgcaacgaggctttacaagcttcccaatcagagtactctactttccttttttgatagaaatacgctcactttattcagataacatggcgatcagtggaatccgatctaccaaaatgttcacaaattctaggaggggagcagaccaaacatttagtaacggataaactggatgaactggtcctggattgggccttcgttggtgaactcgttttattccgcagatgaagatgtggactactcaaaaaaaaaaaaaaaggcaagtctaacgtttgaccgttcgtcttattttaaaaaatattaaaacattaaaaagataagtcacgcataaagtattaatcatgttttatcatctaacaacaatgaaaatattaattataaaaaaatttcatataagacggatagtcaaacgttgtcacggaaattcagggtttgatttttttttttttggacggagggagtaggtagtagatagtggatgattcatcactctttcactttactcgttggttagttaaacaaaagcaaaggaagaagaaaaaaaaaagcactaggcttacgttactacacacgcggcagacaagcagcccatgcatgcttgctgctcgccacgtcctctcaactcgaaagctgtttataatgcaaactcgtagcctctctcgatccccggacacagattcatcaccactagaatcttccacacaaaactcagtacaagatcggcaatggcgcagcagctgaggacaccggcggcggaggaggcgctgctgcgcggccacgccgccggtgacaaggacgacgccgtcgccggcgagagcaaggacgcgaagcgcgcgcgggcggggctctgcggcgtgctccgggagcggaaggtggtggagctggcgcgcgccaagcggcggctggtggaggtcccctacacggcgacgctcgcgcacacggcgaacgcgctcctcgccgcccgcgtctccgctgtcgcagtcgccgcgccgccggggcactggatcggcgccggcgggtccatgatcctcgagtccgacccggccaccggcgccgtccgcaagcactacatcggcatggtcaacatgctcgacatcctcgcccacatcgccgaggccggcgatgacaacgacgccgccgccgatgctgctcccagcgaggccgtcgacctcgaccgccgcatggccgtgccggtctcctccgtcatcggccactccctcgaaggcctcaccctgtggactctccatccaaacaccaggtagtgtcttcttgaattgaaccatacaaatcatttaatttctttcctcgccaaaaagggaagaaaccattatttcttcctgacaaaatcagatcataaataaattgcacatttgcactaatttgatttctcatcatcgtggagttaattagctgttgatgtgtagataattagtgcttattcgggttgtaggatttttttaaggaattttaacctatatatagaaataggaaaaagaatagaagaaatagaaatacatgcacactttaattcataggaatctttcaagaggtttaagtggtagaaaattttgtatgttttctttctacagcttgtaatgaaaaatttccttctgttttcctatactcatattcttgttacaaactgaaaccgaatgacacacataaaaaaatatttcttcagaattcaaaacctttgttttttagctgttgatacgtgtaattgtaaaaaaaaatgtttttattgacacgttgtcggttgttgtgaactactccaatcttgctcacaaaattagacaataaataaatataactaatttcttattctagtatgtgttaaattataattgtaaaattacttgttaatatgtccatttgcaatataagtttgtaacaacattttttttttgaaacaacccgcataagatagtgtgagtttatatagacgtttctattgacagagagaaacaatttcagaatggtgacgcaatttacgattgccttttacaatttgtgttttgtgaactgcaagtgtgctggattgcatggagacgttcagcaagggggtgcaccgcgcgctggtgccgctggagagcgcggcggagaatgtggtggcggcggagctcgtcgaggcggcgccggggtacaggatggtgacgcagatggacgtggcgcgcttcctgcgcgcgcgcgccgccgagctgggggacgccatcctgtcgcgctccgtgcgcggcgtcggcgtcggcggcgccgtgctcgccgtggcgagcggcaccaaggtgatcgaggccgtccgggcgatgcgcgccgcgtcgctcgccgccgtccccgtcgtggacgccgcccccgccgacgacgccgacgcgcggcggatcctcctccagctccaggacgggagggggaagcgcgtcgtcgagacgttctcggcgacggacctccgcgactgccccgtggcggagctccaggcgtggctgggcgtcgccgtggcggagttcaagaagaaggtggccatgtaccgcgccggcgttctcgccgccgacgccgacgaggacgaagagcggcggcgggagatggtgacgtgctcgccggagagcacgctgggggaggcgatcgagaaggcggtggcgcaccacgtgcaccggctgtgggtggtcgacgaggaggggttgctcgccggggtggtgtcgctgaccgacgtgctccgcgtcgtcagggaggccgccatcggcgaggaccgggagctccacgacatcctaagctagacaacttttttttttttttgtcgtaaagacaagaaaagtatgtatctgcactgcaaactgccatggtcggcacaatgtggttgttttcgtgttgtgaattttgctttgtttccatcaacatcaatggatcggtttgggctggtttagttctcaattttttcttcaaactttaaatttttcatcacatcaaaatttttctacacacgtaaattttcaactttcttaactttttcgttacattgttctaatttcaatcgaattttttgttacattgttttaatttcaatcgaacttttaatgtgaactaaacacgccttggtaacacactcaaaaaataattttaactagttcacgcccttggtaacacactcaaaaattgtagtttaatttgaactgcacgtacatttattttggaaccgaaggagtttaatttgaaccacgctattgctgtattgcactgaacttaatttttggattatgcacctacaatctctaagaatctgaatttaaaatgcttctaattcaaaaaactctccaaacagacacaaaagggaaaagtacaccgaaggtccctcaacttgtcatcgagttacaaaatcgtcccctaaccgcaaaaccagatatcggaggttcctcaactaacaaaaccgttcgcttgaggtcctctggtggttttggacccggttttgtctgacgtgacaggtgagtcagcgtgggccccacgtgtcaggctgccacatcatctccctccccctctctcactcttctctctctgccacatctctctctctcactcttctctcctctcactcgctctagggcgggcgcggccgctggggggcgccggtgaggtgggcggtggcggcgacaggggtagggatgagaacggcgggggaaggggaggggagcgagtcaagggtggtggggagacctcgtcggcggcgaggcggcggaggagcacggcgaggagaggagggcgtcggtggcccccacacccgcaaccacccagcacatgccgccgatgcccggtggtccctcgcgtgcctcgacccgccgcggcggaggggcgatggcgaggagaggagggccggcgtcgcgggcgcgtccggcagccagcaggggaggagggccggcgtggcgggcacggtcggcggccgacaggagggagcgcggcggagaggagggccggcgtgacgggcggcggtcggcagccgacgagggaggagcacagctgagaggacgcctctctgctccgcccgcgcccggagccgccgccgacgatgagggcgagtggcgcggccgtcggcgccgctgctccctatccgccgccgccgctccctatcctccgctgcctctcagccaccgcgctcgcccaccgacgctgcttctccgcagccacactcgcccaccgaagccgctgctccgccattgtgctcgcccgccgacaccgccgctccgcttgctctggccgcccttctggtgtggcggcggctccttcggggacgaggccggcaggttcagatcgaacggcagcagcgagcaacgcgagacgggggcctcgtcgtcggcgcccgaggtgctgtcctcgtagagcacggaggaacaggagctgcgacggagagagcaaggaggccgccgtcgtcctccacggcagcaggtggagaggtgacggaggccgtcggagtgggagggcgggcgcaggaggacgaggcggaggcggacggcaccgatagggagcgcgacgggagagcgaggaggccgccgccatggttgcacatctgtcgcccgcgccgtcggcggctgcggtggcggcgtggggggcggccctcctactcccatgtcgtcgctgccgctgcgtcgcccgtcgcccatcgccggccgcccgacctcctcctctcctgcctcgctccgccagccggcttgccgagacagctcgagaacggcgagggcggcgtggagatggggcgggggtcgttggctgcgaccccggcatggcggcctgctcacgcgttgcagctgccgtcgctgcctcgtcggccgccaccctcagccctgtcacgccgctcgtggctgaccccttcaaccggtcgccggcgtcggcatcaacggaggaggaggccgcggccatcgcactcgcgcagagaagagaagagtgagagagagagaggaggaagggagagatgatgtggcagcctgacacatgggacccacgtggggcccacgctgactcacccgccacgtcagacaaaaccgggtccaaaaccaccggaggacctcaagcaaacggttttgttagttgagggacctccaatatctggttttgcggttgggggacgattttgtaactcgatgacaagttgagggaccttcggtgtacttttcccgacacaaaatcaaactcggcgatcgaagtggggcccacgaggtttgccttgggccaaggagagatgagaggttggtcgggttggtcgtcgtcgtctcggtctccggcaaatttgaccgttatttggcccagtccatagaattcttttcccattgttgcccatatttaaaggcccaattcttagcaatccagtctgcgcgggcatcgtcacgatttgccgtgcaactctagctcatactccctccgtcccataggtgacgtttttgactttttatttgtaatgtttgactattcgttttatttaaaatattaatgtaaatataaaaaagataagtcatatgtaaagtacttttgataataaagcaaatgacaaacaaaataaataataattctaaattttttttgaataagacgaatgatcaaacattgacaaataaaaactcaaaaagacaagtaatataggatggaggtagtacatgtcttgggatgttgttcgctcccctgcaggaagtgcgacggagtgacatcgcaagctatccatcgttccatttccatccccttgtgacatcggcaattcgcaacaacaggatacggatgcccctctccagcctgcctcgtcatccgatctaatccaagtactatccaacccgcacgccagagcagagcaaaacgcaaacgcctcctcccaacccaaaagcgaagtggagccccgcccccacatcacatccacctcccgcctgcccgccgcggcgccggagagagaccgccagggacgaagccaggatttaaaattagaggggtgtagaatgaagataaactatgagactgaataattaatattgatagtagaggaggttaaatagtcaccatcaaaaataagcaatgcgtaaactagtactttaagaaaaaaaaattaaattttagctctttaataatatcattggaagtttgaaactagtctttattgctaaattcttttaatgtaaactattaaataatctcataaataagtatcatctattttacttttaaaaagatgagaaatcacaaactaattttgtagatcatgtttattgctaatatttttagacttgctaactaactaaactgataatacttttaagctacataaaataaactaaataaatacttatcttagctaatttaatatagagtaaaagcataggggtgtagtggtggtagtgttttgataggggggtgttggaggcatgtaagtttctttgtcgctgacatatgagttcaacgaatcatatattcacttgttagtgataaaaagcacgatgtttcgtgtaggtagaggatctcaatccgccacggcgcccgtctcccgtcgcctcttcttgtggaccctggcttccttggtctcacccaacttgaccgttgcgtagccgttgtaccttttgtactactgctagtgcgacgtcgttattcttccccaccgggtaccaccacctccaggctccagcttcgcatccacaagaaccacacacacaaacaggtccacaacccacaaacccaactccacctgtgtttggtttcttctttgattcctcactggtttttcccgtgtcccctagtaactcaccactgcaaaagttttggacttgcatgcactttggaatgttccagtagcagtagtaacctatcggtcactgtagtgccaaatgaccggaaattctattctttccttatttggacgtcttctcatttttttacgtatcacttaaaattcataaaatattttaacaatatagatatgatatattactccataacatacaagttaaattccccccaaaaaaaaaacatacaagttaaattcaacatacaaatacaaacaaaaataataagtttaactccgaattgaatgcataattcatatagccaaatttattgttttttttctaattatatttgtcgaatttgaacttatatgtttataaaatgatatatctatattatctattttactgaaaattttgttgtttttttagacattattcacaacacgaaaagacatccactgaaaggacaaaaatccatctccgtatgcctccttgcctttcaccaaatttggcctagcttttgatctcctcttcttcaaatgttacacgctgcacctgcactgaaaagtggtgaccacttttgctagccgaaagaacaatcacaattcatgagctacacgcattgcctctactgtattgtactgtacatatgcagcaagattcatgagatcctgactgcctgccatcctgcctagctgtgttcgtcctcacagaggttagttagccggtcaaggaaaaaaaactcattaatcgccactgctctgtgtcctcctctactctcgatcgatcaccagcttaaccgaaaaaaagtgtaattaatttgcaggactagttgtgtctctctacccaactaatcttgcttgcacagtgtgtacttgtatatatatgctgacttgagtgtcagtgaagccactccatttcacacatcttaattagatacagatacaagttcagctgcttatgttagctacgagtagctttcatatttgcattttggggtctactttggagtagactattgtctctggcaatatatgaaactttgtactagttccatttcaaattggtatgtgtttgattaaggttagatatgggtttgtttccttatcaaaatttagtttttttattttctttgccttacaattttacaaactattttagagttttacacttggtcagaaatcagaatacagtgtatatagttttatacagcttaacaaaggggggggggggttgagaattggttaataattgattattccatgagctagataagtggagcagaatgagtcagcattgtgtctggtaaagtggaggagataagagtataatctatatgtcatatactgccactgacagccttattaagactaatcggtgtgattaagattctctacctacatgtacaacatgtgaagcctgaaggtgtccataggagagctggggaggtgcagagttttttgttgacatttatttttaatctgtgggtggggcccaatctggtgagtgcactgattatctcttatggagtgtacaataagtacattcaatgcactctcttttcgtttattttctgaaaaagaaagaacgaaaggcaaggacacttatcatgtactaagaataagaaaaattaaactctagctaatcttgattatttccatgtactgtagtattgtactgattttttccccatgtactatcatggttgtaatatgtaaaagtattttcaagataattcccttacagtagagttaggattattattatttgtacatttctgccagatttcctaaaaatgtgtgctacatgccatgttaactactccctccacccaattttaaacacacttagtgggttttttattcaatgtttaactgttcgtcttatttaaaaaaattataaaacaaatttaagaaacaagtcacatataaagtattattcatactttatcatcggataacataaaaagttttaaataagacggacggccaaatgttagaaaaaaaatctataactgtatttaaaataagatgaaggagtacaccacaaatggacaataaaagagtataaattcagaagaccagttacctcttccatctaaaaagcagaagtatttttcattttttccatcactaaaaatccaatatttttcccccttttctgcaacaggaggagacacctggccacctggcctctcctcagcaacagctcatattgtttgatttcttccttctccactactacctccacttcctccactcctccaccccacaatctctctctctctctctctctctctctctctctctctcctcccaaattcatctccttttctcatcttttctcatgctttgacgccaccattaagctttggcttttctctgcctcccatctcctcctctgccactagttaaagcagagagagggggagaagaaaggggaggagaaagaagcacgggagagaggaggaggagaaggagaaggacaagggaacgaagatgttcgacagcctgctcaactccaagttctacaacaaatggtaaagaaatgtttcaagctgattagtggttcttgggatttcaggtttagcagttcttgaagttccccttgctgttcttgtggagtccaaaatcgatttcttggagttctttgctgtcgatttgttgtttaactttttcaagctgcgtagtttagtttaaatggtccggattttttgggattaagaaactgcatttgctcgcttgatgggttgttgcatcagggggttggctcttcagttgcttgaattttgaatttgattggttctactccaacccacatctgcatgcctgaggattctttcttggactcttgaactcccctttttcctttggattggattagtttaatttcttgggatttttttcttgttctaatttcttgatttgtaattatttgtgatgcagcaagcacgcaatcaagtgcacccggaccaggctggatctggtgcggcggaagaagcaagcgatggtcaagttcatgaagaaggacgtcgccgacctcatcggcaatcgccttgaatcgcacgcctttggacgggtacagcctgccaaccctaagcctcagcttgcattgattagtgttcttgaagaaagatttactagcttggtgcaaattggatgggcaaagttggagttgtttttcttttcagttgttagcacaacaggtgtcggtgcagttaaaaattggtgctttgtactgaagaatccttgatgagagccccttttagggttgtagaagtatgctgctgatttctgctgtttattttaatgggctgcagatggaggcactgattgttgagatgaaccaagcatcctgctatgatatgatcgagcagtactgcgagtacatagtgaagcagctcaacaacctgcagaaacagaagtatgtttgatgtttattgttatatatcaagacaactgaaacaatactgagagttgagacatggcgttccaagtttatgttaatttctcatcgcagtgtatgatgtcttatattttagttgaccactgccacacacacataattatattttcttgctctgatatatctatgagctgttgaagtttgaacccaagtatgattgcatatagattttctatttaattagctgtgttggttcctggcttatgggaatggttcatttcttgcttttagtgcattggcatagattgattcttttaatcaattattctcatgacatggcaaactccagttgtcatgtatattccacctaaatatagaaaacacaacataagttcagtcaaggggctcaaggctaagcaaacctaatctttgctattgatttatattgtctgcagttgtccgttatgttgttctcctagacttacaggatctggaaactgcagagctgctcatagcttgttgatgattttgatttgtttaagtaccttaatcttaagagatcacaaagtattcgggaaatgggatcggctgtcgttggtttctctttaacaatgtcttgatatgtatatatcaaagtgtcctggcatgccatactacactgaaacaaacttgtttatggtgacagtagcaattgagtaggtgcatgtttacaaagttggatacagctcttgttgcaatcgtttaatatacaacttttgttctgctgcaattgatctttgatcactaactctggtggcccatttacagtgaatgtcctcaggaagccttggaagctgtgtcaactctaatttttgccactgctagatttcctgagttgcctgaactgtgcgacctcagacatatgttcacggagagatacgggagttttgtcgagccttttgttagctctgaggtgcttaaatactgtccttgttgatgtgttttgagttgctcactcgtatcacaccaatgttgattaactcaacctttatgtggccagtttgttcagaagcttcagaacaagtcatttactaatgaagagaagttgcaagtgatgcaaagcatagctgaagaattctcggtcccatttaattccaaggcactggagcgaaagatatctggtgtacctcaaaataaacatgtaaaattttagtgaacttactgaatcacatcattacatgcattccatcctaaatatatgtaggtttacttatatgctgaattgattttttcccccctgcaggatcttcaaaacaagagttcttttaagcgtgtggaagttgaagcatcagcatgcaatgaacttaaggtggataggcatgctgtgcatgaaagaaaatctaaagtgacacctgaagtccatgagaggaagcaggagatgccggtaaagcctaaagatattcatgtcatccctgatgccattggtaaggttggggagaaaagcaggaagaaccgctcagatataccttatgatgtgcctccttcggacttgaagcaaattaatgatcaggagttaaagaaagaccacaaaaaacatagtcaccaccagagggaactgaggaatgcagacaagtcagctcctccatacgcagaacccaaggaagatgttgctgaaaagtctgatgggaaaggctaccatgtccatcgatcgcgcatggctggtggccttgatcacaattggggacatgccgacttggggcttaaaactctgggcctagaaaagcaaggaattgagccagctagttctttggatggtaaaacactgaacaaagctcctccttattctaagccctacaaagcaagtgatgagtatgggcagtctgtgcaagacaggcagaaaatgccagagaaggcagttaacatgcgtccaccttatgtcaaaccaaactctacaaatcaagctgttgatgattacaagcatgccggcactggggaaattggtcaccagagagatggactggctgatgataatacccttcagcccgtttctgtcagaaggaaaagtgcaaagccacctacacatggtgatcgctatgatgatgaggcaaagatgacaagccaaactcctggtggccgacgaaggcattcaagcagaagaaatggttcagatgatgattatgaccagagagttggctatatgctgcccccagatgatgatgctgtcaataatgcgagacactttaagagaatgagtgaacgaagaaaacatggaagcaggcagggtggatcagcaagtggcaatgactacgagtctgatgaggatgagactaacagtgtgattgattttggcaatcttttgccccgagcacctagttctcatcggaaacacaggagtaggagtgctcacccacgcagcggaggccgtgatgatgaggaaagggtgatggataagcttctgatgcactacagcaagaaaggcattgatagggaagagcataaaacaagaacaaaatcaaggacccctcgacctcgagctgatcagcctgctgatggagtcggagaacggtctaacagagaagtggcaccccaacatcctccagaaagaactgtatctctcccttcagactctggcaacctgggtgtgaagcctaaggctcctgctcggtccatttcaatgcagccagacaagtccagggggattgtacaccctagcatgccggatttcgacgaactagctgctcggatcagtgctctgaggaaggaatgactatgagctgccacaaaactgtattcaggcttcagcaggttgtgttctttcatgaacttctctcaaagcaactttcaatgtcagtggtggtcacaggaatcaggggatctctcctggtggtggtaatcttgcttgcagtgctatatgcctagatagaatagtaccaaattaaatggcaatatttaggaataccatacaatattggtttgggtgtggtcctttgttgtgctcatatttgaaagtgaaacaatcttgtatagatgccattgatgaggctataatgataagtgatgattctttctgctagtgctagcatgtgagtttgtatgcatttcaagtttccaaccttttctttttgctggagatgaactgttagatgcagatatggtgtgataaaattgttgtctttgagatctatgctggcacatgagccagagcatttcttggatctttggctttggaacctgaggagttcctgcatctggaggctgtgaccagctgtgatccggaaccttataaatacagtttggctcaactgtctgatgctgatgcatacctgatgttgggctggaaacaaaagaagctgtctcttgcaggattttaatattgatactagtataaagtgccaactgcaaaggatatcaactttgtctgagcactgaaaaatctagaactgagcagattccaatgttttcttcaagcatactaaatcatcagcagtaccatcatgtgacatgatatgatcatacatacgagtatatgaacatgatggtatcctgcacatattgtttgttgaacttgagtcaccaaggaaggccatgtggccgttgctgcactttgacgctgccgacgccgacagctacatatgaccacaactgaacaatgctaattctatatttctatgcacgttcttctggatttccaatcatcagctgccttatttcttttcttccttttttcagagagcttcctattagtcaatcaatactactaaagaaattctttaaacttaatcgaagaaagaaaaaaggcatgggattgatgaaattctgcaccttttttctgttgttaaattctcatttgtttcgcaaaaagaattgcatgaggtaagtggcatgtttacggaaaggtgaaaaacgctcctcaccgattaactaaaaactgactgaaaactacgagacttttgggtcaacgccatacaaaaaccggttaaaaccgatctgttttcacgaaccgacaaccaacggtttttcacgttttgtaaaccaactgtatttctcaggccaagctaagctagaaaaagttcagatgagctcagctcagcccaaggacctcatcacagcgacggcgaaatgcaggatgtagttgtcgccgccgccgccgccgccgtcgagcagctcgtggcagaccagccgttgcagccgggggctcctcggcagcgccccgccgtggtacaggacggtggcggccgccgccgtcgccgccggccggctcgccaggcacgccgccatcctggctaccgctcggaggaacagcggcaggagacccttcacgcatgtaagtatagatttaaaaccaccataaaaactactacttcctccctttcacgggcgtaaaactttctagtgttaaccacattcatttagacgtatatgtttagattcattaacatctatatgtatgtgtgcaatgctagaaaatcttacattatgaaacggaaggagtaccgtctcaggttataggattttctagcattatctatatatgttaataaatctaaaaacaattatagtttatatttattaatatctatatgaatatgaacaatgttagaaagtcttataacttgaaacggagaaaaaacgaagaaagtacacgataaacgcgataaaataagggcaaaactcatagatttaagtgattaactcaccatgaaatacactcgtttgatggatgaaaacgcatgtgagagactaattcgaggtgttttctgaagggtttatatatagatcgatatgtgcatcatcggagacatcgaattggaggattaatcacggaacatcatgaggaggcggcgatgacaacaagaggcgtctaatagctttcatcttcaacattctctcagtttcttcacccggtccaaaaaaaacctgttcttcttgtgatctctgaactctgaaagactcaaactgtaagaaataagtcctgatttacctccctcatctcttcctcatgatcaaatcacctccatcaaccataaaaccaagtataacgcctcccctatcttcaaaaaccggtacaaatagacttcttgggtggtttcgtaagtagtttttttttttctgacgtggacggttgaccatgggtgactcgttgagtcaacaggcaagacccacatctaaggagttgattcgcaccgatttttaaaagataggtatgcattataaccggttttacggttgagagaggcgtttcgataagggtaagagatgagggaagtaaagtagatttattcctaccgataaactaaggccgacaatgacataccggtacggcccagttagctacggcacaccatgaagagctgcaggccataggcccacctgcctgtgacacatccggcccggcccaattacggcctaatccgatacgactacgtatcaactacgcatcctcttcgattattatgcctcgatatccatatatatacctctgctacgtacgccgctgctttaaaactagacggatcgcctttgccgtcaggtcgaagaaacagcgagagatcgatccatccatccatcgagagcttcttgtccatcgccggcgagctctccggtcccggaatcagccgatacctccggagtccggccatgtcgtcgtcggggggattcaagaacggcgggaagcagaagcctctcaaggcgcccaaggccgccaagaaggattacgacgaggtatcacacattcaaatcgtatttttcacatcgctcgattgattgcatcttgaaaatatatttgaatttgagaaactgaaactagcatcaataacattattgatgatcaattatggttgatgaccataatgtgttgtacagaccgatctggaaaacatgaagaagaagaaagaggaggagaaggccctgaaggagctgagggccaaggcggcgcagaagggcgcacttggaggcgccggtctcaagaaaagtggcaaaaaatgagccctggataattaattctttagacgcttattatcttactcactttgtcccaaaaacttaatctgccggatatgtcacatctactaggatgtatattagaatatgtcacatccaatacattgttttttatgggatagcgagagtagttagcagcagcttgaaactgctctagaacagacatgagatgtttcaactcactttttaggttattaatagtagagagtagcagttaattacttacatatatgaggtatcctaggatgttttagaccacaaatatgatggcgtatgatgatttttttttttgcacgacctctctttttaatggttttggactgctctatcagcttatgatggtaatgttttttactgttggtgtggtgatgatatgtttcaccaattcacttcagttccattatcaagttgagtcagtagtcagtttataaacggttcaggaatcatcaggattagaattcagaatataaattaacccaaaccaatccaaactagaaaccccttgtcgtatttttcgaacaggaaaagattatacagtatctgattatcacggccaagatcatttctttttggaacgagatggctcgcaggccgagcaccgaattatggatagttgcacaatgctgcataattaagttttggcaccgtagtatatgaatgttataaagtttttgcctcaaagttcaacacggttcttcaaaatctgatgaggtaaactgcctcaaaaatctgaacatcccaatattgatgaatgaacaaagcagaaacaacgctaccggacgactacaactcaataagcgccatccatttcattgtttgaagttttacatggatacgatcgtggagaaattcagaaagttttcaatcaggactacaactcaataagcgccatccatttcattttttgaagttttacatggatacgatcgtggaaattcagaaagttttcaatcaagatcagctatctttattggggcttttcaacttctgcagtatctgatgtggtagaatgtcaagatctgccagtgcctgcaagtacacagaaacaacttaacaagatactcctatgaatctatgatgtactaaaaatggtatgatgtactaaaaatagtggcaggagcatcaacaaatatgaggctgcctaagttatgaattgtttaatcattgactgtggtacttataataccttaaaagagatgcaatgaccaaactacagatacccccattctttttacacagcagtttgccttttcatggttctccaaaatgttactttgactataactactcgtgacttttgtataatttatattaatgaaatacagtacttatgaacttgacaacaaacctgatctaaataaagtagctctagtatagccaatagattgtatcaaggcatggatgctgaagtgtcagataaaaagaaaaagtgtagggtggtttcctttcatttttgggttgcacataaattttccttgtctaataggtcaacactttagtaatgaaactgtacaagagaaagattaaaaacaacataaatgacaattgagtgatcaacgaaattatcagaaccctccaacacaagtacatcacgattagacaccaaactaaggagaagctgcaattaatttttgaaatggtaaacaagtttaagagaataaaaaagtacaaatattaaaaatgaactgttgaagaaaatgcatttaccattgacatggttaaaaacgtgtagaatcaggcactccatacttgcaccttcccctttgccgtcccaatgtaaatctcattcaactcaggattatatgacaatgcagaaacaataaccttggtattgatgtctgtaatgcattttccactttctatggagcttatatgcaccgctccgatacctgaaagtgaaaatgaatattcttgttaaatcatctgtttgacagtgtagcagatctcagttgatatttatatctttaccttctgacttgcatccagaaataataacatcctcatcttttgttatgaacaacttatcatccacgcaattcagttcatctagtacatgatcctcaaaatttctcactatatctccttgaagatctctcagttctgttgagttattctggaaagacaagaataggtttctaccatgcagtgcatggaactcatatatcccaataggtacctcggtgatctttgaactacgcaactacattaaaatatggaagattgaaaaggatcaggagtgcacaacaaaatgaataacaaagtgattaatactaaatatatcttacatcaagtatctggaggtttccattctcattcgcaaaattctgctttattatcatcttgtcatgtagaggttgaatatcaggtcgtttcgagctagcaacaagcacaaacgagtgtgtttcttcaaagttctgagcacaaaatatcctgaaaggatagacattatgtgtctgctccagctttataaggaacaatgatggcctaagaaaaaaaggagaaagttcaggattaaaaaataaaataaatccacaaatgaacacagtagaagaagtaaacaatggtgtacctaaaaacaacttgatggacattcacatcaggtatttgatacagcagagaataatcctttaagtcaaaaactcggtaggtgctgcagaaaaaaaaacaaatattatgtttgtttggctatcattgcaaggtttatagttacatgataaaaatgatatacctgcgttgttgtatcaatgctcttgcatttggtgcatcaaagtccacactatctggctattttatattttctgattcaaaaatctgctgaccattattctgcttgtttgacctaatgcacctgtgaaatcaaatcaacatcacggtttagaagatatcacagtaagaccacgaatggcaactagtacacagaaactgattccaggttccttactcaagtggggttgatgtgacctgacgagacatgcagccatcaaacaaacgagaagaagttgtaatcacagatttgtcctccttgttgtagaatatagagacaattatttcatcgtcatatctgttgaggattgatatcattttatttgttactgcagcaaaagagagattagtgtttgagcaaatttcatttttcatcgaatttatttacaaaattctaataattacctctgctgagtaaaaagctcaaaccagagcataacactacagcaacaagatcttttaatggaagaatctgcagaactgcagatctcttcctgataggcctctctaagtgtcgaatgacatccttacatctgtagatatcaaatacgacctacaagaaacttaagttaattatactcatctgcagtttattcagctaggaacagcacaacaaaggttaagaaaaaaaggttagaagacaaaacagggaacaactagagataataaccatgaaactctgatcaagcacgaacagactggagggactcaaataaaatttaacttgtatgttgccaaaccacatgttgttttttcagtgaacacaacaccttaaaaataatgcaaatttattcgaattcaaataggtcatagcatactaaagaagtgccttcacgttttgatgacaagctagaagcataataccaatatgggtagagattttctagtcttggagcagaacaatgtttatcgtatgaatgtttgagctacctaagaacaggaggcaagagatcatggattacttctcaaaatcacgtcgactgagcgaaagttctgagtgtataaagtttcgatagaacataagtattgatcacttccactataatcgagaaattagtatatacttgtatgatggttctattctctaagacacatatttacatagcatgcaagaagctttttagataacatgcatgacagattttttttttttaaaaaacgtgaatattagggaatgacctaatatcaaataaatagaaggggtgaggcttcgaacccaggccaactagcccaccaccttgtggagctagccaaaatacccctgggcgtctctcatgcatgacagatttcattgaaagcaagggctccatggaatgaaagaattgcaacataaaacaacaaggactgtagagcaccgtgaatacctgattccgttgaacaatgagaacaaaatatgatatgttgaggaaatacaaaacaggatatataaacatgatatcaggggaaaaaagagtaatgctacacagctacagaacttaccaatttttactacggatttgttcatacaaaatcatgttgcgacatgaattcagtgctagcaattaataatcataagccaacaaagtgaagaacttctctcatcggatgcaactgttttaacaaaacgtaaaaatatcgaggcttagctgatgattgttgtgtcctcaatgcacggacttaattctttgagaagaggcacacggtaaggaagtttagtaccaacttcatcaaaatttctaaggaaacctcaaattattttcactcaaaagagggcacaactcagaataatctagcatagcaatttcatcaagtaaacaaatgaaatgaacagaaaagacatgttagtctgcaagaacttaaaagtcacaataatctaccttattgttctttatcttggagaagacctcatgtgagaatgttgaaggtgtgggtacgaatctgctgatgccgcatgtcctcaaagagcagtgcaatccgatttctctaaattgtagcttcataaccgtgctgcagctcttctttctttgcttgctgctgccttgtccatcctgcgcatgcagaactgcatctttaagcttttcatgttcacacaatgaaagaaggaaaagccacagcttcataagcataggtccatactacgcacctgtttatcgatgcatccatcaattttggccgtcgagacgcccgcagggcctccacgcgcgcaggaaagtatcacggcttcttcatcaactttcatcgcattctcgtcctcgtcttcctcctccaagaaaacccgtcttctcctcttgcctcctcctcctcctctctctaggacctgtcgcccatccgctcttccaccggagccttgatcatcctggctgtcggggatgtcgccgtcggaaatgagactcagtttcatggcttcaggaatcttgttccccccgatcctctcctctgtagggtttcttgatttcttctcgcagataggagaagtgggagcagccgatttcttgatcgtttcttgatcgtgtcagaaaggagaagggaacagcagcagagggcgagagaaagaacagcagaggcgggcacgcgcgaggcttaaaaaaacagcggctcggcttggactcagctcggctcgttaccaatgttgggccggaaccgtgaattgttgggccggcccaaagcagggctactcgccggcgtaacgagaacggaggcggagccctccgccgtggaggtggccgccgcatgcgctgccgctccggcttgccgccggaactggatcagaaacgcggagcagagcggcctggagcgaggagcaggtggatcggtcgacggggcggggagggtagggcgtacatgccgccatctcgccggccggcggagatcgcggggggcggagttgccgccgccggtttgagtgttggtgttcatggcggcgtggcgcggcgcggcggggaggaggagaggccgcggtggcggtggtggtggtgcagcactgttgctgccttgccggagagggaagaggggaggggaggggaggggaggggaggcgaggactgaggagagacggcgacgactcgcgcttccaggagaagcggaggagcggttcggtcggtgggtgtgggtgcaatgcaaccggacgctgacatgcccagcgcccaaatgcaaagctttcctttgtttgtgtttcttgccaaaaattggacagtgtttttaaaattttattttgcggtgacacaatgataattttgaagtaatagaccaaatggacattttcttttgattgtgtttcttgaaaaaaaattttgtaatgataaatttacaagaaacaaaccaagtggatatctagttttattagagagaaaattcgatacatagcacaagaaaaaactcggtaccaaaaaatagcacaacacatttttcacttcgaccaaaggcacagggcaccaattttcttgcgattcatagcactcccgtcacatttgccatccaaacatgtgagttgacatggaaaaagactcatttgcccttcttccccgagcctgccgtgcaattaggaggatgcctcgcattgtgattaatctggggagtactacacttgcaaaaagctaattaggatttaattaattagttgattaattaggtaattaatgaccatctcggcgaggctatggctatcggtggcttgtcccatcctcgccctcacatggatgtagtctttggctggctctggcttctcctcagctgccgccgcgtcgccatcgccatcatctccaacgttagcgaccttggaccgcttcgggctcgcgttcgtggcgtgctatagcacgagttgttggcgctagcgctaccgtggttgcagatgctcccgagccggccgataaggcgccgatggccgccatctcatcagtcatcaccactgccctgcggagacgacacgagcgagctgagcgcggagtcgaagtgcgccacggactccgccgccgccggcgccatcatcatcatcatcatctgttcaaccgccaccgcccatgatggcatcatcgttatcgtcccgtacgccgccgccccgcgggcagcaacgcgcccgcactcgtgtcggcgccggacgaggagatggaggaggagaagtagtcggccatcattgtcgtcgtcagcggcggcggcggcggcgtacagcaaccacatccatccacgccgacgctagggccgcccgcgtcatcgtcgtcgtcctcgtcgtcaagcggccgccagcgctggaggcttgccctggatcagcagtgccaagcgctagacggggtccacctctccgacggtgagcaacgcatccacgtcattgaagagcccgcaccgcagctcgctcggtggtgatggggagacaaggcagtcgcccagcacgccgatggccgccgcgccgccgaccacgagggagcgaaagaggagacctggtggggaacgtggggaacgaagggcaaatgtgtccgatgaaaattttctccacaccgatctaacgccgttacttcaaaatccgatacaaaatgcgatagaagtgctacggggcgaagaaaaattggtggcctatgctatagatcaaaagtggaaattttttgtgctattttttagtactgctttctttcctgtgctatggatcgaattttctctttattatatgaacgattttttttagtctggactagtttggacaacaaactaaaagcccaaattgcatatgcaaatttcacgcaaacataaattcgactagcactttgaattacaccggcttaaattgtactgctgctccgtattttttaaggtcacgtcgatgtccttgtgagtcgatgaaactagtattgtttcgagataaaggggatatctagatccgggtgtaaaggtttagcgtatcacatcagatattatataaagagtcgcatggagcgttcggacactaataaaaaaactatttacagaatctgttagtaaatcacgagacgaatttattaagcctaattaattcattattagcacatgtttactatagcaccacattgtcaaatcatagagcaattaggcttaaaagattcgtgtcgtaaattagtcgtaatatgtgtaattagttattttttaagtctatatttaatacttcatacatgtgtttaaacgtttgatatgacagggtgtaaagttttaaaataagatctaaacaaggccaaagagaacaagttgagaatatgagatgggattcagccattcaggggtaaataaacaaaatgaaatttcaaaaccgcagacaagtccgagcccggtagatggacgaccaagatttctgttgttcgaatcggaaattaccaaatgccgtaagccgtaaacgaatcggaaatggtcagtagactataaatatacgtgtccgagactagagagacaacttgggtgccctcatttgttctcttttgcgcgcagacgagatggtgcagaggccgcgcaaaagggcgcggacgacgtcgccgtgctcgccgccggcgtcgtcgtggcgggacctcccgctggacatcgccggcgaggtcctccgccgcctcccgtcctacgccgaccgcatctgcttcggcgccacgtgccgctcgtggcgcacgtccgcgcgggaacaccgcgcgccgccgccgctgtcgccgtgcctctgcttcgccgacggcagcttccgcggcttcttcccggaggacgcgcggccgttccggctgcccgccgccgccggctggctcggctcctgcggcgagtggctcctgtaccggcgccacgacgacggcgcgtacctgctcgtcgaccccttctccaaggccgccgccatggcgccgctccccagcgtgtcccgtctccatgtccgccacgaccccatcgtcgccgtcgacgagcgagacctgcggtggtgcaggccgacgtggctcccgcgcgagaacaccggcgagccgcaggccgcggcgtccttgctcaagctcgccgtgtccccggccgccgacgtggtggcggcggtggtcggcgaagggaggcacggcaagctcgcggtgtgccggccgggggcgccggcgtggtccgtcagcggcggcgacggctggaggcggatcaaagacacggcgttctaccagggcaagctctacgccgtcgaccacaacgaggacctcctcgccgtgacgctcgccgccgacggcgagccaccggccgtgtcccgcatcgaccgcgtgatcaacggcaagccaccgggggcggccgccctcctccgcgtgacgctgcactacctcgtggactccggcggcgagctgctgctcgttcgccgggaggtccagcgctcgtcgatggtgaggacgcagccgtggcagcacacggcggagctgcaggatcgcttcgccgtgttcagggccgacttccggaggtcgcggtggaggcgggtgaaaaccatcggcgacgagtccggcggccgcgcgctgttcgtcgggcggtggtgctccagggcggtgcgcgtcgccggcgaccggtgggccgatcaggtcttcttcctcgaggacggcaccggcgacgagtggcacacacgggcgcagcgctgctcgctgagggggagcaccttcgggtgcgtgaggccgaatgagctcctgccgttgatgacgacggcggacggccaggatttggatgcgacttggatattccctcgggaggcaaaattgtgagtggcataataaccaaatgctgcataattgagttctgatatatggagtattatttatgaaatgtgtagagtttttgcctcaaagtttaacatggttcaccaaaatctgatgaggtcgaaggcctcaaaatttgaatatcctaatttttatgaatgatatgagcagaaaaaacagctacgaactacgggttgaccttgagcgccacccattgtttgcaattgtgtacatagatgaaatcttttggagagattcggaaaatagtttgccagattaattgtgggtcagctatctttattggtgccctttaagttctttgatgatgccatcagcaagagaatctgcatcgtagttcttgccgtaaaatttaacaaactccatctttggattcatcaagtacctgcgagtacatgagctgttacttaacaagacatacgagatatactagtgatactatctatttcctaatacttcctccgtcccaaaatatcgcaacctcccaatatatagcaacctagaagtgaatttggcctgtctagattagtagttctagtatgtctaattcactctttgcttgctactccctccgtttcgaaatgtttgacgccgttgactttttagcatatgtttgaccgctcgtcttattcaaaaaatttaagtaattattaattcttttcctatcatttgattcattgttaaatatatttttatgtaggcatataattttacatatttcataaaaatttttgaataagacgaacggtcaaacatgtgctaaaaagtcaacggtgtcaaacattttgaaatggagggagtatattttaggatggaaggagtacgaacaacaatggtgtggcaggagcatcaacatatctgaggctgcctaaaattatgagatgtttagtcaatgactgcagtagtgcagtgctataatctcttaaaagaagatacaatgtcctaactacagataccattatactacagcagtacgcccaatagttctccaaaatatgactttgaataacttttatttttacatagtttgtactaaatgaaatatgatcttaacaaaaaaaagtctaaactagttctcatttcgcaaatatattgtattaacacatggattctaaaatgtcataaaaagggaagagggagttattatttcacttttgggttgcagatagattagccgtatcataggacagaacaactctattactagggcatcttgattgcacaccatcagcaagtctaagttaagcaatgatactgtacaatatagattaaaaatgacttacatgacaattgagtgatcaacgagataatcagaaccctcctcctctgtcttcatatagtaaactcgataagcacgagcaacctttcttatctcatcagttgtgccagttagtcctattagatttggatgaaactctgccaaacacaggttgctcgtcatgattagaaagcaaataaaatagaagctgcaactaatttttgaaacggtaataaagtttactagaagaaaaaatgtatggatatcaaaatgaatggttgaagcaaaagcacgtaccattaacatagtcacgaacttgctctacagtatctctctcaggatcaactgtgatgaaaactggcacaacttccatttttgccttttcctctgaaatcaacacaagtttttacattggtttcatgtacagacctcaatcaaagacacagaaatagaaaaaaacaagaaaaatatattatgtgtccagggacatgctccagcaaacacaacagatttccaatggaaagtggatactgccatcaccaagttaaataaggttcacacctgtattcttttatatggatgtcagagtatataaattttatttttgtgcaatttatttgtaaggtagtgaaataatgcacagccacacctaacttgtaagcagcaacaacagcctttggagttaagttccaaacaagttggggtaggctagagtattccaattggtttcaatgaacttttcagtgacagcgtcatggcacttagcacagggacaagatgtttggctacattataagcatgtatacagtgagttatcaacaaaattgtacccaaagcacaaaaatcaaatcgacttacttattttatcaattgccaaagccatcttttgaagttcatctggacaaatgtcagggcagtgtgtgaagccaaaatatagcagagtccacttgccaaagaaatccttttgcgtgacaggtttcccatcatggttcaaaagattgaatggaccaccgatggctgcagtgcctactgatggttcttgcttgacagcacttgttctattcttcaattctggcaaagatgtgccaagagaaaaaaaaatacatgagaaattcaacaatgagcatagcgattgtaagagcctgataaattcctactacatattaaattcccattaagcatttgcctttattcctaccacatagaggtttggcaaaactgaataaaatatactcttaaccaaagaaaagaacacataaaaatgcacagagttcgtaatataggggtttcaactttcatatgcatataaggttttagacttccgtaccatgcagtactttcaccgacctatgaaggtttcactggtaagcaactaaccagcagcatttacatctcttgtttaatgactctaaaccccctccttttctttctaatcatgcgtgcaaagaaaatgcagctatggaggaatcaaatgtagtggttttaaagaaaaaatatgaagggtgtaagtctataaattgcagtaatggactatataagtgaatcaaatggattagattcagaggaagtactaagggtatgcatttgtaaaatgcagctataaaggaagcaactggagtgatatcataatatataaagggtatgaatctctgttcttgaaactggtgtcactattcttatagtcacggcccctatgcaatacaagataaatgaacttaagcaacagcaagccaattctgcgaagttgggctgctcttctgctggtgcagctagttcgttttgcctctcccatcttacatacaacatgagacagctcgcagtaaatgctgtattttctacagtaatacttcagttcaataagtaagcaataaccaagacaaggaaagcacagtacaataaattaatcattgcaaagttactctaggcaacatattccgcaggtaatatcttcctaggtgttacagatagaattccagtaagttaatttgaccacaacacaatgacaatcttctaatgtgtttttaaagaggcatcttagcaccacaacaaacaaaaacaaactcaccatagtaatctaccttcaatgtgacgctttttttccttgtcgtagtacacaattatccctcctccagtcacgagaagcaggagaaagctcaaccacgacaccggctgagagaaagcaaaatttcttcaaataaagcactgaataatgccatttcaagcaattgggccgatttccactacagaggattccagtagaagacattttgaaggactcacccctcctcgcactgattttccagcgtccccttgctcagatttccctgacttcccatcacccccttccccgccggtcgccgcggcaggcttcgcgctgtcctgcgccgcggccgaggcatcggtggagaagcccccgcgcgccaggaacgcagccccgaaccgagatgcagcccccggctcagtgatccgctgcagcacgaacacgcatcaacaactaatcaaatctcccagcctatcaaggtgccaccgcgttatagatgtggagcagaggacgaggcatctagggttcacctgaacctgcagcgcgcgaggacgccgcggagcaggaaggccggtggtggcgagcgcgcgggctaggaacgcggccccgagccgagatgcggcacccggctcagtgatcccctgcaagcacgaacacacatcgaaaaatcatcaaatcaacacagaccatctcgttgccaccgcgttcacgaccgatgtgggtgttctagggtttcacctgaagctgcgcgcggggcagcggtggaggggggaggccgccgaacgcgagcgcgcgggaggggagcgcgtggagacgcggggcgcgcctcatcgttgtcacctcaaagcggcggcggcggcggcggcgcgccggatcggagaaggagacgggattggtcagctagtgcgcagcaaggcgagcgagcgagcgtttggctccgcctcggaggagcggcggcgcccgtgggtttttgggggagacgggtcgagaggttttacctctctttgcttccgacgcaagatggtggtcgccggcatattcctctcaaatttctcccattgcaagggcaaaacagtaatagcacaccaggagaaaatttctgttaaaattggtaaagtagcataattaacttccaaactaccaaatttattagttgaaattccattttatatttttaataacaacgagtactaccacatcagaaaatttactagttgaaattccattttatttttaataacaacgagtaataccacatcagaagaaaaattctgttcaatttggtaaagtagctgaaactaattcctaaccaccaaatatttaaaattttgttccatttattttagtaacagctataatattgttttttaattttagaggtcgttctaatgttgatttcttttatgaattcagactgaatttgtatggaacgatagaatatttaaatttgatttggttggggtgcgccaggcccaggctgtagtgcaacgcctgggcgacacgcgagggcccaagtggcaagccactgtggtggaccctcccccacaaaaaataaatttaatatcgaagtggacacatggcccacatatcagatattaaactgataagaacagatactacacttgatcttagccaaaaggccgagaaaggtatgctttggaacggagccctgcgcctcattttataccttccgcgaccgcctcaccgagctgaacaagcgaggtggtactaaactacgcaacgaagagcaaagcagcaacctgcgccgcggcttccactgcttgggcggttgggcctgaaacctcgcacagcccaagtggccgagtagttgggcccatgaactcggcctcgtttatctctgacatgtgggaccggatgattttaatctgaggccacgttggacacgatcgcgaattcgctctctgacatgtggggccgggtggtttgcatcagaggccacgtcggactacacgatcgcgagggaatttcgcgttgttttttttgtgtttccttcgcttcgaatccttgaaatctcccggtggaaatcggcgaaggggaggagtcgatcgatcggtggagttcgccggcggcgagggagatggacggcggcatgaaggagcaggggatactcctggtgcggaaggcggtggaggaggacgacgccggcaaccacgcgcgggcgctgccgctgtacgtgcacgcgctcgactacctcgccgcgcacctcaagtacgagcggaaccccagggtccgcgacgccatcactgccaagctcgccggctacatcgcccgcgccgaggagatccgcgacgcgctcctccccgccgccggcgacgacgccacgccgcctgcggcagcggcggaggagggcaaggcgaagtgcggcggcggggaagacgagtcggatcgggccaagctgcgggcggggctccactcggcgatcgtctcggagaagcccaacgtgaggtggagcgacgtctccgggctggatggagcaaagcaggcgctgcaggaggccgtcgtgctccccgtcgagttcccgcagttcttcaccggtgagtttgggttcactgggatcccaaacaaattaatagcaaaaatatgaaaagatcaatcacataaaattgatgttactggatttatcattaatcaaactatcataatatgtggttctttttatttaaaatattttatttttatagatattgttggtcaaaatagcatctcgaaaactgtgtcgaagttaaaaaatgtttatattttaggacggagggagtactcaatgtgaattgcagtacctaggcgattgatcaatggtgaaattactgaattttgtaggcaagcggaagccatggaaagccttcctcctgtacgggccaccggggacgggcaaatcttacttggccaaagccgtcgcgacagaggccgattccacattcttcaggtaattgattttcttctcatttcttgtactggtactagttgattagttagtgggttctttcacatttgtgatcgaattggttgcgtgcgttcgattcattatgtagcgtactcagcaaattcagttaattttattttgctcgatagtgtaatcttgtgcctttttgttataagagcaagtttaatagtatagcccactaccggctccaattcatttatagtcaattcatacaatagttacttaggagtactatactattaatatatggtcccacctgtcacatacacattacgttttggggtccgtgctgcagctggccactgctcttctctctcatcgtttatctcattaaaatatgattatagctggctaatagcctgctattgtacctgctctaagcattgttaaatttggacaaaactatggagtgatctgtcatctttgttctgttattagtgtaattactaatctgaagtgacggatggacacacactgcagtatatcttcgtcggatcttctctccaagtggatgggagaaagtgagaagctggtgacgaacctgttccagatggcccgtgaaaatgcaccctccattatcttcatcgatgagatcgactctctgtgtggccaacgaggggaaggcaacgagagcgaggcttctcggagagttaagacagaattcctcgtgcagatgcaggtaattgtcttgatgcagtagcatatctctcgcttcaaacgttcgttgatgaatgcaagtataagacagtggtgcaaaatttagttttgtgtgtgtgtgtgtgtgtgtgtgtgtgtgtgtgtgtgtctgtgaattttgctccatagctagctaagttttttttaaaaaaaatattctgtgaatgtgtgggatgtgcagggtgttggacataacgatgataaagtccttgttcttgctgccacaaacactccatatgctctggatcaggtagaacttacaagacatccatcagttatctcttccagttacattttgcatctcgtttgtgttattgtataagcttgagtgatgatgatcgatcgatcttctttttcccaggctgtacggcggcgttttgacaaacgtatctacattccgctacccgaccttaaagctaggcagcacatgttcaaggtaagtacaaagaagttagcaaaaagagcaatgagattttctcaaacatgcaaccttgaaactgaaacttttgataagtcttgaacctgaatctgaaatccgcattgcaggtccatctgggtgacacccctcacagcctcaccaagggcgacttcgagagcttggctcgccggaccgacggcttctccggctccgacatcgccgtctgcgtaagccacaccacagccacctatcccattttctgtagcagtatgcatgtcaacttgtcatttgatagccgacgatctcttggtcgcgtacgtgcgcgcgcgtgtgtgcaggtgaaggacgtgttgttcgagccggtgcgcaagacgcaggatgccatgttcttcttcgggacggcggagggcgacggcgacggcggcgcgtggacgccgtgtgggccgacgcggccgggcgccgtgcagatcaccatgcaggagctcgcggccaaaggcctggctgctcaggtgagtcctggctgccctagtcattccccgaatgccagaatgccatctctgtggcatatagcttcccttcagccaatagactttagtcgaaatttaaattttacaatttaatttttaaacttgattttaagggtcttttcatcatattttatttacaaacatttgcttttaaattgctaaaacacattgacaaaagttttgttaataaattgtttttaaattgtaaataagccgttgaagcttatgtataagggcgtgttccaaagtctaaacggaggttgaaaacgctgataatggataaacgtgattagcatatgattaattaagtattaattattaaatttttgaaaaaataagtttatctatttttagaatattttttatataagaaagttttcgaaacacaccattaattagttagaaaaacgtgctaatagaaacggggaaagtagccaaaagtgattctcactttagaacgtgccctaagggagacgatgactgtggttgctgatctccttgtctactgtagatcacgccgccgccgatcacgaggacggacttggacaaggtgctggcgaggcagaaggcgacggtgagcgagaaggatctggaggtgtacaccaggttcaccagagagtttggcgaggaaggctagcatcatcttgctgtcatactgtgacatctgattcctgtaaatgatcagtaagatgcttctgtatagctagtgcgcactcgcatcaggattagttgaatgatctgatacaaagtcttgcatgggcaatctttctttgcatggtatcagtgctgtgagatgctaccacgtccatataatttcctatctgcctggtaatgcagagttgctcatggactgttacagtgttaaaggctgggattgcccataaatttgccagccagaaatgaaatttctctacttacaaacatcacgggcctagatttaggatttaggatgcatgtttaaatgcatcatatccctgtgacatacaagcttgctgcaaagacgatgtcacgcttaatggcattggacgcagtctccattttcttatgcaacgcggagttccccattatggaagctgcattcctgaactccctgcaagtttcatccaaccgcacgattgttcttacaatgagaccttcagatacatctgtcagctcacagatgtctgcaaatggggtcccctgcattgaaagatcaaataagaacacactgattctgcataactctcgcagaagagttcccgtgacgtgaggatgtatacctttgcccattcgtagacgacttcaacaagaccgaacttgagattatcacgggcatattcctcgggatctacaggcaccttgaactctctctggagctttcctaatctgattgctgtatcataaatcctagaatagaaaataaacacaagaacaaatggcacttaagtgtgttttgcaggcatttgaaacagaaagcacaaattcttcgaatgcatcatataggaaatgacaacaagcacaagttttttttttaaaaaaaaagaattaaatctaacctctttctggcatctgctagtttcggggtaagagatggttctgatgtattcctttgttggaagaccaatgcagacataatagctacggcttcttcaggttctaggtcatccaactgattctcaaacagacattcggttgatatcaactcctcgccggaattcatttcgcaggccactcggcccttaagttgcaccactagatcagaatcaatgtaatggatttcttttagtacatcgatctgcacacatggaaaggtaagaaatgttactttcacaaaccaatccacgggcgctcagctggaaaacaccagcttatcaaaatcaaactcattttttaagacaatagagtagcaccgtgaaacttccaatatgccaaacaaatcaaaagtgagtggatgaaacgtcatttttttttctaatcccagttctagtgagactgaactttgttgtgccacaaataatagatatctaattccttattatggagcgtgagaaaaatatatatgtttgacatcttactctgccttgaaactccggcatctgttgaagtgcctcatctgacatttcatatttcaaatcattcagctgatccttgtacaccttttgctccttcatcaatgcaatatgctcctttaattttatacaaccatggcacttattttcagacattttttgcagtaatctctggtaagcatagtagttctcaacgagaagcatgtctttcatttttagatctgtattccatagaaaatgaagaaattagacagtgacacaatatactatttataataaccatgcacatcaagtaaaactaagcacatgatcactgagattataaaacataaaacataatgcagatgctactgcataggactatccactatctggtagacagcgaaggctattttatctagccggtcaaaacatcattaacggttacatattataagccatgagaacatggtaatttccctgcagtcctataccttgcctatttacaagattgactaaattgttaataattttgaaagtagtagtaaattatagaacacatttaccactatatcagataactttttcttactagcttggctggaactttatatagcaccagatttcatatgtaatttaaccatagaaaaaaaatgtaccttttattgcatctaaagcagcaggatacttgtttccgtctggttgctcttttataagcatctggacagttttagagtaaactgttttgcttggatcctcaaggagtctgacttgatcaatctttattttgctggcgcatatattcataatctctttattctctattgctctaacttcaaaacccattccagatgcatctcccttgtatggtagcttgatattgatgacacctgaacctttccgtgtactgacagaagagaaatattcatcttccatgctacgttttcctttcgggataacaaagtatccttgtttaaaatcccctgcttccttttcattctggttggatgaatcaggagctagtgctgacgatgtgcaatcaccggtcagtacaagaacaacatattgctttagtgcagcagatggagttttcacaattacaccgagcaagtgatcatcatcctgacacaaaagatgaaaattttaatgtggaaaatgcatctgttgcacatttgctagatacagttccgaaataaaaataagagacagcaataagaccaaaagtgccagattaatttcaagcccacataaatttattgggatccagtgtggcttgtgtgtattcgcgagtcacctgatatttaacatgtttttcccttagtttggatgcttacactaccgaagattctaccccttaattttgaagtgatatagaagacatccgcaaaacttaaataatgattgatgtcttctaattttctcattttcatttcttatgcactacctctacattcataaatatatacagtagaccagaagataatttctgattgattgaataaacagttagcccggcccggcgattgaataaacagtacgagaattggggggaagggaaaacggctataaaaaaataaatttattataaaaaaggaatagacaaacagatagaaattgtgcacaagaggcagcccaataggatgaatacatactgattgggatttaacaacaaccagacggccaggtgtaagggactgttgagaagcaggcaactgcataattgcttccgtaatagactccctgtgtgcctcagcttctaagaccatctcgtagtattcttcaatagccggctctccttttatgcacctgataatataagaaagaacaagacatatagaagaagttaattgttcgcattatactaggtgctacttttcatgggtactttcatacaatcaatgcctatcaaaacaaagtgcaggtaagataatggtacatagataatattgcaaaggaatggttaaaagcccactaaaaaagatatgaagacaacaatggaattctataaacatcctgctgcattttcttaacaaccaaagatcgacagatgactgctatatgcgcaaacccaaccagatacttggtcttttcccctagatgtttccataaagtcgtacccccatccctattctgatgcggttaagaactggaacgtagtggcctaaggctactcccagatttagcatctaaacctctacatctatgtaacatcaccaagtcctgtgtgaaaaatgatggtgcttattaatatattcgtcaatgagataatttctacagagtgagacctaggaagagatgattctctttttctaaaacttcagacaacctccaccaaacacatttgcctactgtggtattttctctcacctctttctttactactccctccgtttcatattataagtcgtttgacattttcaacacataacacacatagtatcaaaatatattcactgttacatctgatgaaactaatttggcgttgtagatgttgctaattttttctataaacttggtcaaacctaaagaagtttgactagaaaaagtcaaagcgacttataatatgaaacggaggtagtagttaactgtgccaaatctcttatgctaaaggtgtgtgctagttctattctaccaaggatggtgtatctagaatttgcatgtccaaatcaaaaatcgaacacaaccatccttgtttgttaacttcctatgtcaatgaaactatgctagtttttatttgcagtttttaagtaggatttgcattgaaaacattggtacccatggtatcaatttcatgaagataggttaatgtctcactcaattgtcttcgtgggttgacgaagcatctgcagaagcaacttttccttctcaggcaaattcttttgtgcatggaattctgcaaaacttctctttagcatgtcctccacctgtgagcaaatccatcaatgtaagccaaggagagaactttttcctattgtacatttagaaaagtaaatggcacacatctaagacatggtgtcactgtcctggggctaccttcacccattgttcagcaatataacaatcggaattttacattaaagaagagatagtgaagtaaccagtgcaacctacacataatgtacaatggtcagggacagtagttcggaaacattactggaccttgaatagtcaaatcatgcatatgccttcataaagaaaagggaactcaacaaagttgtatcacattcactattccctaacttattataaactaattatagatagcacaagctaatcacacactcctcccatgcctatgcagagtcaatgccaaatgcataattgatcaagtagtcaaaacagtcatggaaatggaactttgtgaacaaataaataataaataggattgtttttatagcagacgcttcattatatcatggactaactcatcacaccttaaaaacatatgtttagtttatatttcagttttcagtcttcaaagttcgaacagatatttttaatgtgtgactggatgatcaaaagctcaagaaataccaaagggtacatagccaaattgaaatatggaattgaatttgaaaaaagaggaatggccaagccagaaagttttctaattggtctatataagtgtaccttgagttcctccacacgtagaagatgcagtatcatagtgtatgttaaccgaaattgagattctagtcgagttggttttccaacaatcaaattcttcaaatcactttcttcgggaatttcatcacgacacataacgatcactgtaccaatgttatcaagccctctcctaccagctcgcccggccatttgaatatactcccctggaagtaacttccgatgttcttttccatcaaactttcttaaggaatcaaacacgacctgttagatttgcaaaattaagtcagagcattgcagcttgcttaccagatccttgagctaagcatgggaaaagcaagagtaactaagaactgcagttagcttaatttaattttgatatttttattacaaagaaaaaaaagtatgtatctatctgacaaacatttatagtttacataacctgtcttttcaacaaaaggaaaactggaaatcatgataactgtgcacaacaaactgagtttttaaaacaacaaaagtgtgtaacgaatgtggaaagagactagtcatgcattcaaaattggcttagtccaaagcatgttaaacagaagtctgtctacatgcggtcgacattgcaattgtagatgatgctagcatcaataagcatgacaagataaaaggttgactttcacctccaacatcatgagtaaagagtctcttcagcttttgcattactgtgaaaatgaaactatcaaaatgtttaaatatcagaattagcagaagttatgcatgaataaatgatagaaaaactgattgtttcattcccattattcaaacatatatgggaaaaactaataagtagatgacaaaaggcaagtggtatggtcacatagagccagatcttgcataagctttgtttgacacaagatgaaaaggtatttaaatcctcaatatgacaaaagaacaaatagagcctcaccgtccttgctggagcattaacgcccatcgcaaatgtctcagtggaaaataacacctacaattgactccaagtcaaggttgacattcagttaaaaaaatgaatggatcagaacatgcaatatttgattaatgtaatgttgaaaagaataaggtagtatctgatagatggcatcgatgtgatttgatctcaaatgtcatttcagtgttacactgttcatttgttcaatgtgttgaatcacgtaaaagctttgatagatgacactcttattgagtattgtgcaaaactgacttagaaaatgcaggatatgatggccccttctttttcataacatcgacttcctctagtcataaatagttgacgtttaggacaagatttggttaaactttagaaactttgaccatcaatttcatattagaatatgtttatagaatctagtaagtttatgatgttatgatagtacttttcaaggcaaatctacatgaaccattttaaaactaaacatttgagaagttattaatggtaaaaaatttcaaaagtttgactaaatcttgtcctaaacgccaaatatttatgaccagagggagtagcaaatatcgaaaaactagtatagattatgtacatggaatagttctcttcaagcttgaagaagtttagatactttctaaagaaactaactaccaaaaaaaactacaacatgttcaaagtttaaccttgatgacgccacgacaaaacagcatttcaacaacttctttgacgataggaagaagtccagcatggtgtactccaatccctctacgtagaaggctttgtatccctacaacctaacagggaaaccaaagtttcaaacagaaacaaggataagattgtcagactaaaatcatttgtgctactagatcacctgtggaaggttcctatcagatcctttaaggcgtgaaaaggccttgtcacagaagaggcggatttcacttttctctgagttactggtgagatctgcaccaaacatgctctctgctgatctatcacatcgattttttgagaagcaaaaaattaccacctgtcaaagaaccatataaaatatcagaaaagctcttgtaaaatgtaaaatgacctggcatgatgaatgggaacagtaatcaatgaccaatatgctgtgaccaattgttacttcgcaattgattacgtacttcagaatgcacaatggagagtggaataataaaatttgatataaatttaatgctcaaaagaacaaaatgttatgaaattcattgctcaagataaatgccataattttatcattctcacatacaggcacgagggatttcttcagaaggttatttatgaggggcatccagaatgaagactctgatctccgtggcccagaggtgctttgctgaacagcagcagctgatgagctggcatgatggtgctttggatttttctgatctctacctctactagatgtatctggatttctgccttgagttccagcacgtactgcagttgttcctggttttgaaccaggtttcattccaagcttgctcgaatttttctttttaaaaacctccttggcttctctatatccttgagtaagaaatgcatccttctcacatattttgaacacttctccggagtagaacaaacagtgctccaggggaacaggccttttgttggtcctgatgaacaaatggcagcaaaatggtatgatgcaaactgtaataggaagtagtttaaaataattctgcacttacaaaggtaaagacactataatccactcaactgatgtatagtaatagataataatacgctgtattattcagttgtaagaaaataaggtgatttggtcttattttcttgaaatgacccccatccagtactcagagtttgctcaattaatccctagcccttccacttactgagatttgcccaattgcacaccttcaacagttcaactaatgtattcagtatttcagtacatgcaccaactgaatcaataaatattggaatctcaaactagaaaaggcaattaaatactaattactccctccatccaaagcattccaagcgtttgaaatttgtccgcaaatataagcgttccagaaaaatacttgtctcatcaatcacgtctcattcaaatttcttcccatcttacccccaaccacccttccaccgccatgcatccctcatttagtgaggggcacaccaatgtcttttctcaatctttgttaaacaacctagaaaagcttatatttggggatggagggagtgctatctagaattagtgatatagctttgtgtaagaaacctacataaaacaacaaagatgctacttttattgatataaaaatcttctaaaatatttagcaagctattgtgttttatcattggtccttagggaaaaaaagaatccgattagagaatcctcacggccatagggttttaatcaacaaaaatagttgcaatgatgagtttttagttgcacaagatagtacattaaaggcactcagatcaataaaactacaccagtggcttgatcgcacaaaataaaataccttaaggggcctacaatgcaattttgcttgcttaaaagtgatataactacacttacgatgtgacatgaattttcttctgctttgttcgaccaatccagtcagcaaattcaactgtgtttggaacctaaatagaaatgttacagctcaactccaaaataaatatcaatctgagagatgatatgaaggtcacaactcacaagcttgagctttttgtaagaaggaaaagaaaaaaaaaagtctatgatgtatttaaaagatatttttggcattcaaaaaccatattaacctgggctgagccttatcaggtataagtggttgtatcatagtagcttagtagaaaactggcacaaccatactttctatgaaaatcaccttaaggtcagagtactccactaattattttaagagacagtaaactataaatggttctattattctatttctgagttactatagttaatccattaatgggctaatggtatgtcatgcttttgcatacttgaaatgattcttaataatttgagtgacagtcttagcagttgatagcaacacaacttagatatcacagttgggtgccaatagttaaacacaagtattcactaaatccataccgttgccgaaagaaggacaatgttgatgtgcttcgggagcattataataacttcctcccaaactacacctctctctgcatcatttacataatgcacttcatcaaaaattacctgattgcaaaaccacgcacggcacacggctccataagtttttaaaatataaggtgggaagttaaatattacattatgaactatgaagaattgagaactgagacagcgtacccattcaatatcacgtatgatgtcagcacctctgtagagcattgaacgtaatatttctgtggtcataattaagcaagttgcctctggtctgatactgacatctcctgtgagaagtcccacgtcaaacttcccacagaaatctcggtatttttgattgctgatagttttaatgggagcagtatagacagcccgggtgcaatgctgcataataacattagctgtcatcacaaggaccatgcaaacattgttttattgagatgtactatatagtaagcaaatagaaatagcacaatgaagtatgtacaaatcaggcattgcaaatatcgatctactgaggaaacgcaaaactgagctcttatcagaaatgcagaattcaaatcaactaaaagtaaatataagttatgttcatttttacaagcactgggttaatgaggtactcaagtgaagggatcggtggtttcaaattaacgaaaagtagaatacccaaaaggaacagtgaagcaagcgtacttttgttgctaaagcgaatgcatactctgcaacaaccgtctttcctgctgatgtatgagctgccacaaagactgattcacccttctgaagataatatatagcctatatttggcagaatagaaagttacacatcagcaactatatcaagcatttagtagcatatattttactaacaaaaaggttatggtaattagggtctgctcacaataaatgattcccacaggagatgtggaggaaagaatgcatttctcataattttttccttatccgaaaattcaatggcaaaccttttgtttcaaaaatatggggctttttacttctttagagtgacaagtcataggccactcacagaagtggaatgcagttgctggttgcattgaaactattcttttttactatatgtggtacttgatagggaaaatatgcatagttaaagtattgctggtgcatggagtttttatccttcactggtaaaacatggttgtgctatcaaaaagtccatgttaacaaaatgtgcttgtagaagaaaatattcctgtcggtattgaaaaataagacattgaaaacaaaggtgcagacatttatgaatagcttacctccttctggaatttgtctagttcaaatggatactcaattgccatatctggaacaagtttatagaagttagtcacaatgtcttcatccccaccaacaagtgcccaaacctgcaagtgaaatagaaacagataaacatcactacttcatatctatgcatcaatgaaatttatggaatgagaagcacaattgagaaagtgtccgacaaaatgaaacacgaaatgcacttaccttgccctcctttgccatgctgccatcacctgacccacttgaatctctgctagtatctttaactgaggacaataacatttgatccaagtctgattgaggttcagaaacatctccttgggcaccacctttctgtttttcaatgtccagattttctatagtttcagaagcattttgcagtttgctaatattttgtttatcaacatctgaagttggaaaagggggaaggttagcatgaaaccagagatgacttaaaccttgtagtaaaaatggggatgatgacagttatcatgatttaccacaagagaagatattcatgtgaatcgaggatatgatgtatgaggatgataaatttaccattggtctcctcatctccaaccaattgctgaacatgatcttcacgcggcaccttgtcgtcagaatcttcctcccatgctatcttgaatagatcatcaaactgcactgagtacttatcctgcaagaacatgagacattcagattataatgtataatagcaaaactggcaaattgtggaatcctgaattgtttagaatatgaaccgaggtaccatggtgtcatttgatgaagatgtggattgctcatctacacgctctccatcctggtaacacttccaatggcttttgtactcctataggaatatagtgcacacaatagcggcacagacgcagcttagcacaatgacagcaaacattactttgcaaaacaaaccaacacactattaaggatcaaaccttcaaattgcccaggtccaatcccttgcggaatcctggaggattaacctgagctggccctccgctcataagctcgcgcacccaatccccattgcgtgcaccctctggaaatgccttctccaaagcagcagccgcagccgcatcatcatgcaggccccctgggcggaacgggcggctgttcacgctccccctcacgaaatccttcgcagggccaggcatccgcggcgttatcccaccggtgcccgaatcaaacacgtcgctcatatccatctgcacggactcaggatcccacacttgcgactcctgccgcgacgacgacgacgacaatggcggccgtcggcggcggaagggcggctcccaggcgggcacgagcatggtgcgcggggcggagggctccagcggcggcctagccaactcgaaccaatccaaatcccacaccctcgcgccatcggccgcggtggggaggtggagctccgggttgaggtagttggcctcgaggtactccttcacgctgctcgggctctccagcgggtacgccggcggctgcgatcgccatcacacctccgatgggtttagggtttacgcttccgcaacattgagtaaaacgcgtgatttaggaggtgggggagcagtgggtcgcgtaccaggacgaactcgggtatagggctgggcggattgggcgtggggtcgaggcggaggtggccgccatggccggagaagctgacgcggaacggcacctcgctcgccggcgacgaggtggtgaggtcgcccatggaggccgccgccggtgaggaggcggtccgtttcccttttcgacggaagacgaactggtgctttggggagtttcagctttacccgcagaaacaatagaagaaattggacgttcgatcactgtttggattggatttgttaaagtgtcactccaaattgatatcaaaccgtttcttttgtcatattcgtcatttcacaatatttctattattttctgcagttgacctgatcaaaatatccctttgattatcgtcggttactcctttgccatctccatctcctgcctacatgaactaaacttgtcgtccgtttattgttgttgaaggagacggctgaagacctgagctctccccgcccccgtcgcggcggccgatgtcgtccccgccgatgacgcgccgctcttgccgaagacgagctcggagagaccgttctatgacaacaactggtgcacaacccgtcgcatctgccgcatccaacccgccctccttcctcctccctgtggtcgttaccaatggcccgctgggcgcgtccatctcatcttgtttaactgaacgaaggggtattttgggcaagtcaagtccgaaaaaggtagaaatcctgtaaaatgacgaatatggaaaaacaatggtttggcattggttggaagtgactttttaacgaatccaatccgcggagtggcatttgagcaaaaccctcttttggcggtggtggaatgtccaatttctcgaaacaatacatactccacctattttgagtttcactgggaggaaaatgtttttttaaaaaatatactttttgtcacgatttgccaatagaaataccctttttgacgaaatttcacaataatccgtgcaacaatgtaatccattattttttaaaaaaaaacaacccactagataaggtaaaccattttccatgttgaatattatcaagtgattgtattggtgtgtattttaccgctcaccgacatcaacaaaaatttgtaatcttgtcaaaataccatactcatggagcatcaatctttttccacctttgctcgtggagtagcaccttttgccatcaaagtctcacctctgctttatatttggactaaatatccaaatcacgagacataaaatctattactgtgatgctaaatagagtatgatgtttttctggtcagtattgtttctagtggattcttaatcttactttaactgcctattttaaaaaggtaatggaaagagaagtgaagaagaagaagaaaaaaaactctaaaattaacaaactaatagcactatctttaggggccatatggttaatttagagttttatactttttctaatctctccgaagatcctacatccatggtgctatcatcccacatgccattccccattcgcctcatagaattcatcaatacatgcatgcatctacatttttttctagctttctttatccaacgatcatgcaatgcttgatcgcatgtctctgattcttgatgctaatacaataatctatcaatcgttcatactccatgtcataggggtcgccggccttgggatcctttagagagcccgtcaatcatagcgacattggctctaagctccttgcaggtgatgttgaatccgatgatggggagatcatcaggagaaggaggaggaggaggaggcgacaatgtgttaatcgatgacaatgtcctcgactcattgccattgccacctcttcccatgcggccgaccccacgatgccgacgacattcatcgcggccacaaaggcatgtcattgtcgaattctcagggccatggacactgcaaccgtggtcatcatcacatctcaaggttccatcatttgaattatatgatgaattaatcataataataagtgcaaatcaagttatcagtatggcttggattgccaggaggaagaagaagcaaaggacaaaacaacaacgttggttgaggagcttgaggggaaggcggccatggcagaggcgagattgaggcaaaaagaggaggagaatgctgaactgaaacggaagtttgagggttaccatgttaggtggctgcaacacgagattaggctcagctctctcaaggaaaccattgatgaacaaatgatttctctacaggtcagcatcataacactatcaccagctacgtaattaatcaaaccatttttgcagccattcacgtgacaaagtgacaataatctaactaacctcgattgattgtctgaatctcacaggtggctcaagaatgtgtagaaaagagatcacgtgaaatgttatcactatatgaccgccaagaatcctcggaatcctacgtgaagatgtctaaggaaacatcggcgaggttggcgcacagctctcgccattatgcgggcattgctcgtggtacatgcacggagttccgacaacagagccaagcactcgtggagtcaagggagccatggcagccaagcactcaaggtgggaattccattgatgacctcgagaagctcaagtcaaatttttgcatgtggaagaaggattacaaagctcgactacggaaagccatggccgctgagctagatttagagggaagacatcgaagcatatgctggatttaaccacataacgtataatcatatatatgtgtgtgctattgtttcttgtagtgataaaaactagtgtggttttacatatttgatgtttttatcaaggcatgcatttgatataaaggttgctaaaatgctaagaacctcctataaagtgcagagtaaaaacaccaatagaaataagaatgttatgtttcatcgcgtcaatcaaatccccgtaccaattttatggtgcatctatttattaaacagcaaaaatcatttggtctcatggtttagataagtaaacatctcaacgaccttgtgttggagacggtatgagcaaataaaaacacctttaatacccttatgtgaggaggaaactaaaagaacttgcttacgccttgtattttatacttgttgacttgtcaaccgaaaagaaagaaaacttaaatatagagttttttttgttgaggtcaatttttcatatttaacctttaaaccactcataatacatatactacatttttttgttgaacaatttctcacaatatcaccgctattaaagctcgtggtcacatgccatgaaggactcaaaccaaaacccatgatagcaattgacctcctactacacaactacacaagccaacccaagagatttgtagtgatatccacgtttttcttgttgctaaccacaattagggacggtggagattgtatggacagatccacaataatgtcccttcttcctttttcacctcaaaccaacatctgattatgccatcttttactgtgctcacaaacatgagatccctttccctaattggtgacaaccctgatgcagccaaggcaaaagttggaggagatttggtggcacactggcactggtactcaactcaagatcaatccaactttttttgacatcataagttttatggatgaaatcacttgcctttgcaacaagatttggatgcatgtcatgctgtggttcgatgttgaacggccgtgtgcttcaaagcgggaacgaagaccactgtaggtgagggagaaagttgagggatggtgagatgagagggacagccataggttatgagagggacagccttctattgtacatgctcttatacaaaattgtcctataaacaatttacggtgcagttgttcaaccactgatgtatatatatagtggtgtagcagctgtagaatcgcatgggtgcatcatcagaccaaaggtcagggttaattttcagtctcagaatctgtcaatcaacatattagctggacaaatcctgtaaaaactaacctttattgaaaggaacagcatgatttgacagccatggagacgcatgtagtaacccctttttcccggcgtggctgtgtaccatccgctgccaatcagaaaaaaaaaaggaaaatatatgcttgcttttctctatattatccgtcccagctagtacatctacacggttattagaaagttcgctcaaaattagcagcagtgaggatattataaaaaggtttattgtttattaacccactatcaaaaccaaatgccatttcaatttggtgcctaattatttttgccctggcttaacttggataaactaagcaggcagtgaacggaaggcactaaaaagggtcaaaaagattcatgcgtacccccccgagggcaaatgtcccatttttgaatcggatcaaacttctagtgtgaaactttatacacataaactttatatagataaaatttatatatatgaacttcaatatctaaatcaaacttggttccattttatacaaagaaacattccacattgaaaccttatatacataaggttttcctaaaatagtatttctacacacagaagacacatctaatttcgacatggctccaatttcaacatcaaaactttatttctaatcaaacattttctttacatagaacatttttacatataagctgtgtttagatctaaagtttggatctaaatttcagtcattttccatcacatcaacctatcatatacacacaacttttcagtcatatcatctccaatttcaaacaaaatttaaactttgcgctgaactaaacacaaaacacagccatagaaacatgaaccgcgcacacacatgtgccgtgcggaacacgcttgcatatttaccacgtcccgcgtaaatgtttgcatgctacacctcataacacacacaatgtttgcatgcaccgttcccgcgcaaatgtccacgcataacacccagcgcgcacatttgcgtgcaccattcccgcgtaaatgtttaaacgttcgcgcattacactacacactgtacacacatttgcatataccgcgcgaatgtcccttcataaacacccaaaaaaaaggtgtgaaaacaaaaggagaaaaaaaccacgaggaggaggaaaaatgggaggaaggtggagagggccagcgtgtgaaaagggctcggcaccgtgccggcgacccgggccaaaaaaggcccgggtgatgcgaatgtgcggtgcggtgcggtgcggtgagccagaagtagaccggcgcaccgaggctgggctggtagtacactacactggtgaacccgtacgagccgcgtgtatttagcgagcggcagtagcacggtggagacggcacacgcaccgcttcgccccgccgaagagacggacgcctccacacgtctcttcctcttccttgatactgagagagagagagagaggaggaggaggaggaccagccatccacccgcgcggccgcggcgaatccatccaatccgcgtcgatgcggcggcggcggcggtagcggggagggggtggaaatggtgggggatcaggaggggaggcggcagcggcggcgggggtggggggaggaggaggaggaccgcatctcggacctccccgacgcgctgcggctccagattctgagcctcctgccgctcaagtcggcaatccggacgggggccctctcgtcgcggtggcgggggttgtgggagcagcggtggcccgacccgtcgtcgctcgacgtgcggctgccatcggggggaggagccgcgtcggcgtcggtggcggcgctgcgggccgagcacctcgcaggcatcgaccggcgcgggaggcggcggatggacctcttctcgctcgccttccacgcggggcagctcgcgccccccgagctgaagcggttcatcgagtacgcggcggcgtgcgacgtggaggaggtgcggctgcggctcgacggcggcggcgggcgtggggcgagagggggcacgcggcggcccggcgcgctcgccgtgcacttccccatcgggagcaagctcctcgcgcggctgtcggtgcgggggctccacctcacggcgtccgccaacgcgatggtcgccacgctcgaggtgatccatttccactccgtctccctcaccgacgccgcgctgcggcgggtggtctccgcctgcccgcgcctccgcgagctcgagctccggtactgccgacacctccgccgtatcgatttcaccgtcggggcctccaatctcaagagcctcaccgtcgtcgactgctcccgcgccacggagctgcgcgtgccatcggcgcccctcctccggtcgttccggttcagcggcgcgttcctctgcagcaacattttcggtagcaccgcggattgtgtcgagcatctctacctctgctccggcgggccggagacaggtttgccgcgcaccaacttgccgtcggcagtcccccgcctgtcaaacctcaccgtactcaccctatgcagcattgctctccaggtctgcccaagtatctatgccgtctttggttgcgtttcattttgttgcttttgtgcttatacttgcacgccttgtagtatgtctctgcttcagtagccacccccaacgtggagaagagcttgaacagcttgagagagctccagctgctcatgttcggaatggccaactccaacctcgcagatatctatagcttcctcaaggcctgccgttgtcctcagttggagaggctcttcgtgcaggttgttatttctaggcaaaatgcattttgttgctagtttacttataggtgtgtgccatttatgtacttaacatattgtgttcaacattgcagctcccaacaaacacttatgattcgttcacgacgaattatttggaggtagcagaggaagaaccgcctgaaggcggattagaaaaccttcggttggtcaagatgacaaacttcaagggttatcgcaatgaactacgactggtggatttcctgctgaggaaagctagccgtcttaacaaactgttcctgattgctcccaaggaggttcacccacaaggcctccgaaaggtccactcggaggcactgccccattttctcaagacagatgtattgcatcttgaaagagcttcagcaatcgcccagataatttttgatgagtctgttagtcctcagatactacccttgcattcggaggtctttgtcagagtttagctgaaataagcaattgcaccgtagtttaattgctgctccttaattattaccattatagcttttaggcaacagacatgaaaaagatctgcaagcatacaaagtttggtataatatatttgcaatttatgttttgaaatgtctgggtaagatggttgaaatttgtggtattccagtcctcttatgatcctcgtgttctggcaagatgattgaaactatagtttggtataacataattgcaatttgtgttttcaaatgcctgaattttccttgtccaaaatcccctcaagagttagcttatttaaaatttgcttttggcatgccatctagctaaaacatacaccaatgtgtgttatgaacataactgtgtgttatgtggtaccaattatctgtaagataccatttataaaaatgatttaccctggaggtggactggtatgttttgcactctaaaattggtgagctattctgttgcctgatcttcatgacacatgtaaaaaaatacattagagaagaaatgaacacggagaaagtgtcttaccgattataaatttggacaaactacagaagttatggacatcaatgtagcatattcaattgttcgtgaacgtgaaaaatatggtttgaacttagataggacaggtggcacggatgacagaacacgtgtttctacattcaactaatgtgaattgatatgggctatgtgttctttttcccactccttggactgtatgtcacgaattaagttacctgtgcaaccttaagagtggttttcattagcggtcctcagagaatcctggtcttgtataatgtgtcttatacatctttcagcatgcctttcttgcctgtgaaactgtgcgtatatcttgtttaagttggtaatgcacgaaagttcccaaggagtttcttaagaaacaaatactttcttaaaattcgtattctgtgtatattcttgacttatgttcatcaatagcaaacatatttcagtatagaagctgaaaaaaaagtggcgcagatgtactcaaataggaatgtaaatttgaatgaactcttgctcttcactctttattcactatagaggttctttagtcagttggactccagttttttatacttcatgcaaatatatactagtataagcttgtttgatgatttctagcatctatgctcatttggtgcttggaatagagggagtcctgtactgatgtttatgcatttctattttgtgtggtggttgcttgcttcctgctgttatgaaatgcatctgagttctgaaggagttggtttgattcttctttctctcccttccttttctttctttctttctttctttttaattattttaaatggatggaatgctttctaaattccaaccaatgtatttagttttctgatctacatttattttaagtcagtgtgacaaagttacgatgaaagatagctttgtgtcggctttgtatggaagctgaattacttgtggtgttggtgggagccagttttactcgatactagcaacattgacttttcatgcaatcatatatctgagaagggcactgatgaaacatatggtggtaagttaagtcatatggaagcgctatataactcatgctcaaaatgtggtgttgggactcttatacctgctttttatttggggctagtatcatggcctcttagttctgttaaatacttgaatgtttgggtcatttggatgctgagggatgagatcaattgatgaacagttcttagctagctttgtttcttggctttgcagtgttggaggaggcatgactgaatgaaccatttcatgctgatgatttcctgatgtaagctcacactgcccctaagaaggtggtattacccttggtctgttgggttagctggggggacctgggtggagcatctttatgaaatttcttatgtgctccttatatgaactgaaagtcatatcaccttttattgttttgcatttgcaccttataatgccagtgtgccacatagaactattgagccacacagcattgtgatttgtggaatgatatgggtaatgttgataaaggtatccattatgctacaacctattttatgcatttttatgttgaaaagcactgttactaatgtgtttgtattttgctatattttgaaccctttaggatatgaaccttacatacatgtctattgaataacactttccttgccccgcaaaaaaaagaataacgttaacttttcttgggcttagtgatttctaagctttatgggattcacactttctctgtcgtgtgtttctgtagtagtacttgcatttttctacctactggttcacaggcgtttaaaggctggtcaacaaacagtaacataccatgacaagaataactaggctattggtatttagttgtgagataattttctgtaaatatatgcattttcatttttttttgtcaaatccttctctttgccttcctaggttatggatatttagataattttccattttgatgtcaaatccttctctttgcctgacacattcaaagatgactttatttgatgactttttcatgcttacatagctacttatgattgttctccaaagcacagtaaaatatcgttacatccagaacaaatttgatatgccatgtcataatttctgcaagttaatccatacttctgctttatattaatatagattcttgggtttttatcagaagttgaaagcaacgttgagaattccaccgtttaatgttcaatgcctattgactcaaggggttgtacactacactacactagaagcacctgtacagatccgattgtggctgggaggaccaaggagatttagttgtttggtaacctattgcacacaaatactcactttaaaatcctaatacttttggggtgatttgtgtttaattagacattttcatgcaaacctaatcatttcttgagaaataatttatggtagcacctccattgataaaatttaccgttggtgatttctcaatacttgagaaataatctatatattcttttattttagtctgcaatctatctaaaattaacttttcaaagatacatgagctacatatatcctctactaacagtgccaccttgcaaaaaaatcaggaaggaggagcagcttacaagatctcaaggaatgtgattggttacttggaacgccttcacatatgtcggtgaggaaatgaagggatgtcctactttttgtgatctatggtggcatggtgggcctactgtgattgcccctgtagcagaggtacatgattttattattgaaggtctcccacaactttaagttattcagtctgcatgttatgttgaatatgttaggtacatatttacatatgacaacccctattttcaatactagctacaattctttttcaagatggctactaacttgattaagaaagactgggtaaagaatttcctgttacaagtgtatacccagcctcgttaatatttcttatataaactgaagtcagcctttgccaattagaataacatcttagtagaacactatactacctctgttcttgagcaatagacaatttgaccattccatgtagaacaaggcaacaaattttgtgaccaatttgcccttggcaattgttaggagatggtattaaaaaaaagaataaatgggaggtggggggaaaggaatggatccaaaatagaagtatctagaggttttctctatggtggaagattgatttagacccacaagtgtagccatgggaaagtaggggcaaaattggattttaccaatgaaagtatggtggtgacaaatattctgaaacaaatgatttggtcaaattgccagttattcaagaacggatggagtattatttgcctctgataaattcttttcttatatcactcattttgttcagttaatttaattacataattttaataataagctagtattacttcatgctaattttgggctttgagctttatagggtactttgtaacagatgagttgttctggaacagtagatgactaattagccattagaaaccaatggtttggtttggcagtcaacatgtacatactagaccaattccctggaccttttgccctaaaataatatgatgaccattgactatatacatggtaataccagcaccctgtccttttggccttttatacaaggagctgaatgcatttttggtcttttactccatagttcgatatttttctgatggtacttccctggtgtcaaagcaaagcctgcagaggaagcacaattcttattctgtatgataatgatcaactgcgatgaactcatcaaacatcagttggggaaacttattcgaggctgttgtttgggctgctggtcttggaatcacctctttttttggatttcattcatataaatgccttgttggtgatcatatatcatatatggctcatcaagacatgaattgggaaaggtttgttgcccaacagctcaggtggtttctacagttctatttccagtcttccatgagtattttcattgttccatacgtctatactactgacctgtaataaatataataataaataaccaattatatgtctggtacatacatatgaatgctctctcaacgtctcttaaatatttgtgtcctttgcagtaccttgcttttcttttgtccttccatttttcactgtattgtttgcctagtatacctgccttttcatttctcctcccatttcactgtaccatttactttatgatgaatggtatgtgcacatcttatttaaatcagtgtacagcatacgtgctactgtgctagtggtggtctatgttgaaagttgagactactttttagtatttgtattccttgatgtcgagctatgttgctacagggactacaggatcaagttatttgaagtggcgatttagagccataataataataataattagtcccctctcttccagaaagtggtgcgggcaggtggacatgtctgggtagtgttcacaattcccttaaaaggtgggctacaaaatcatggggaaacttgtaaattaaaaaggcacaagcaattagccaattactggtagtctttgagtcctattggtgctcttctctttcttcacttggtgaccagtttttgtattttatttaccttgctcttcaaaggctcaaagctaccaggtttcagcatgaaggagatgtatgttacttccaagttcatccatattattttgggggtttaatttttaagtagtggcagctggagaaggattttacaaagacgactgggtatatcttgttatcccatattgggttcttccgggagcaaaactgcaaaagcactgtattgctgattggatggcccccattacaatccgtatgaccttttaatatctgattctggaggtagctgagagtaataacctttgagtatctaggagcagcactagcacgtacactgcacgctgcaaattattatactaaaatgaaatgcattttctaggtataaacatacttctataaaataatatagctgcaattttctcctatggatttcctttgtatggagaggatgcacctttacttgttctttatttacttactacctctgtcctacttagacttcaattttttcttatgaatctagacaaatatttgtctagatgcatatatatctagaaataaagtgtggtctcaagctcctagtttttttttaatttgttctacagggttagcgacgacagtatgtctagcttatccaatcctgaatttaggagggtacatcagtagtacatcacatgggaggtggtgtgccactgggataattaggtaccacccgtactggtcagtggtcgtacagtctctactactccagcatgctggtccattttccctgctcaatgctcacaccaaccaattagctcttttccagcacgtgcacttgctcttatcttagctctccgtaccgtatctaatctctttgtaactacctttataaatgaatgcagtacacagctaaacctgctggatacagacgagcagagggcagcatggggagagtctgaaacaggtccagtacctcaggtcctaacatgtgataaacttctttcacaccctcttatcatttcacatttgcattttacagcctattactgttatgcattgttcacttgaactgtgaaaggactggtcattgggccatggcttgatgcaaacattaatctttcctttaatacttccattccaagttgcttttgtcatgcatatttttggggtctgtaggtccaccatgcagtagcgctcagattctgcatcatagatgaccccattatacagtgtttctttcaatgcaagtttgtatggtactactgcaatctgaaaaaaaagggaaaagaaaaagaactgtttgtttggtgccagccagctttttttccataggacaaaacaaagaagggaaaaggtaaattgaatattaatattttactaaataaaggcatttatggaagagttgatgtttgcacatatcacaatgagaagcagtttatatatgattatcaggtgtaatcaaccctaccgaggtttatattaaggatatgcttcacaccccagcactccacccacctatcccactaaatctaacccacttcggtgcagcaaaagatgcctcgagcctgtggcaggcagagcagtgcaaaattccaatcgaagaaaccaaaaggaggcagcaaaaagacagatcaaatggattcaccaactgatccattcatctggccaggccagctgggctttgcatatacattgcagaccactagagctataagaaccttatcattatcatttactaaacagaaaaactactatctgcatatcttcaattccatgtctccaactccaagaaccagttttgatcccaacaggagtgcaggaatggaggtagcagaatgcagtgagaagctgcaaattttaaaggcatcggcttcagcatcaatggcttattcgattgttcagttcccagtcaagtggcaatccatcaagtacaagcttcagcaactctgttccaacctgaatgcgccaggagacgacggcagctgcaacgaaaatgtgattcttgttcagtttcttcagacggctacagcaacagtaagtcatattcaagctattgcttctcaatgcagcgatgaatcttacaatggtggaaggcttcgtctgaggagtgatttggacagcatcagctccaagcttgatatccacctgaaggacctcaaggagatggtttcctccagaatttctgtgcgttctcaagctgtcatcgcaacgaggcctgccattggtgcaagcctaagcaacaagaggttctacatcaatgatctcttcttgagggtgaggattggggatttggctcaaagaaaacaagccctggtcaccattggagagctcctatctgaagatatcgagtatgtcaagattgtagctcttgacattgataatagcatcactctcctgatcagctttcttgaatcaggggatgcatgcattcaagaacaggctgcaagaattgtctcccttattgcaggctatgattcttacagaggaatgcttgtgaaagcaggtgtggttgctccacttgtccagttactggatagtccaagctgcaccagcactactgtttcatcaagggagagagcagctcatgcattgagggagctgacgagcaactccgacaacgtctgggccgtctgcgcacaaggcggtgtcaccgtgctcctgatcgtctgcgccaatgtcgatagcaggggcaagctggtcagctccgctttcgcggtgctgaagaacctgagcagggtggaggaggtgaagatgttcatggtggaacaaggtgcagttatggagttggtgaagctgtcccgacaaaaggaggaagaacgcaaagttggatcagttgagctgctccattacatggccttggctgatgccaatgtcagacaagcagcaatcagcatggggatgatccaatcactcactcagctgatgaaccctgatcttccatactcatccaaagccagggaggttgctctctcagccattgcattcttctgcctcccttccaaagctctgacagatgatctcatcagctccaattttcttagctggcttcaaacctatctcaacaatgttgactatgctgtcctggaatgcaccctcaacattctggtacggctaacgaggatctccgaggaatacagcaagatggttggcagggcagggttcatgactgccctggtaagctcacttggagccaaatcttgtcaggtcagggagatggcagcacaagtactctgcaacctactgttgcttcactctaaccgtgtagttttcatccaagatggtgataatctgaaccggctgctgcagtcgcttgagcacggtgacggcaagacgatggcgaaggatttggccatttcttgcctcgtgtcgttggcagagaccagtgctggaaggaagaagatcatatcgtctcaacattttgtcagcttgaaaggactcgcagactccggtgaccttcctgccaagaagatcgtgaagaaactctgtgctaacaagttgcaaagcattcttacgagaatccggatcacatgacttccttctcgcgtttacctgatcgctcttcagttttgaaccacagaattcattgattcagcttttgctaccctgcgtggctgcgtgctgttcatagttcctctttgcctgttacattcttgttcagtcctcactactcatccctacaattcttttgtactatccatgaaattcttttgtgtagatcgcacggcctataatcaatcaatcgtttgtttgtcacatccaacttatgatttttgaagctttctgtagtgtttcatactttattgcccccaattcttaggtgcacaaaattgaacacaagtcgttatgccttactgctataaagccacattcaattcatgaccaggtgattttacaaaaccaaactaaaatataacacaagctagtgttccttggtacaaataaataagaactaaacgaaatttcatcttctttgcagcatccagcaaagatgctaacttgtaaacttgctaagaatggaaatcattttttctggttgaccttgaaaccaaggagacgtccctacgatttagggcgctcgcgctcgccatgcacccaccattgccgtcgcgccgttcgccgaggcctcccctctcttaagtactcctctctctcttctcttcctccattgattccctcctccgcgcagctcgcggcttcgatcgatcgatcgaccgatctcccacgtcgccgccgttcgatcgatccgccgccgccgccgccgccggccggccgggcaagatgccgggggccgtgatcgtgcaccaccacacgcggtacaagacgtaccccggcgaggtcaccggcttcgtcttcttctgctgcctcatcgcctccgtcggcggctgcatcttcggctacgacatcggcctcaccggtacacgcaacctcaccggccgccgccgccgccgccgccattacatacgattcttcttggttgtggttgactgatcacgtccatggcagccgggttgacgtcgacggagtcgttcttggcgatgttcttcccggtgatcttcgagcagcagcaggagcgggtgatcacgaaccagtactgcaagttcgacagccaggtgctgacgctgttcggctcgtcgctcttcctctccgccatggtcgccggcatcttcgcctccccgatgtcccgcgccttcggccgcaagtggaccctcttcgtcgccgccgtcgcctacctcatcggcgccatcctcggcgccatctccttcaacttcatcgttctcctcaccggccgcctcctcctcggcgtcggcgtcggcgtctgcatccacgtacgttgtcatgtgacatcgatcacctgcataccataacactcattattatttgtatgtgaattaaataattatatttatttaaataaaacaataacataagttgaaatgatataaatctatagataagcatgtaagattaaatttaatctacaattagaaaaaaaaagagtaaaatcaaacagtgaatagtacattgtaattgtaatgtacaacccataaaaatttgttaattttattattgaattttaacttacatgtttctatagtgtcttatatcattataatctatcttatcaaactttttgaaaattttatataaccatttaaaccgcatgtatacagctaaggtgtagaaaatactcaaaattatatatcagttgttgatcgatcgccggtgattggcctgcaggcgtcaccgctgtacatatcggagatggcgccggcgcagcagcgggggatgctgaacatactgttccagctgatgatcacggtggggatcctgtcggcgagcctgacaacgtactggacgtcgaagatcgccggcgggtgggggtggcgcgtggggctggcgttcgggacggtgccggcggcggtgatcgcgctggggtcgctggccatcccggacacgccggtgtcgctcatcgcgcgcggcgagggcgaggcggcgcgcgcgacgctggccaagatccgcggcgtcgacgacgtgcgcgccgagttcgaggacctgacgacggcgagcgaggagagcaaggcggtggcgcacccgtggcgggagctcttcttcggcggcaggtacaagccgcagctcgcgttcgcggtgctcatccccttcttccagcagctcaccggcatcaacgtcatcatgttctacgcccccgtcctcttcaagaccgtcggcttccgccaggacgcctccctcgtctcctccgtcatcaccggcctcgtcaacgtcttctccaccttcgtcgccgtcatgaccgccgacaaggtcggccgccgcgccctcttcctccaaggtggcacccaaatgatcatctcccaggcaagcaagcaaccacccatttcatcaaacaccttgactgcaaaaccaaagatttaatttattcagcaagcactcacccatttcatcaaacaccttgtctgcaaaaccaaagatttaatttattaacaatcttgtttgatttctttgcagatcttggtgggaacattcatcggattacagttcggggtgagcgggacgggggcgatgtcggagcagtacgcgatgtgcatcgttctgttcgtgtgcgtgtacgtggccgggttcgcgtggtcgtgggggccgatggggtggctgatcccgagcgaggtgtacccgctggcggtgaggtcggcggcgcagagcgtgacggtggcggtgaacatgttcttcacggcgttcatcagccagatcttcctcaccctcctctgccacctccgcttcggcctcttctacttcttcggcgcctgggtcctcctcatgaccgtcttcatcgccaccctcctcccggagaccaagtgcgtgccgctcgaagaggtggcgcacgtctggaggaagcactggttctggcgcaagttcatcgtcgactcccccgaccgcggcggcgccgagatgaggaagaggatagccctagagatgagctagagttctctactaatatactgacgtgcaaagcttttacgcgttcgcgaaaaagagaagagaataaaagcttagctaacatgaacaatgttgattgattgatctatcatttcagttaagctaattgattaattgcctgattatgatagaagaatacacatactctcttcatcaaaaagctcatcatagtatttggataggacataatctataatgaatttggacaggcggcctatctagattatgttgtatctagatactaggttgggttttttttacagatggagtacttttcatagctaggggtgcagcatgggttcactcattgattagttggtaattaaacttgttgccgattctgatgttgtttgtactactggtatgtactctctctatcttaaaaaaaaaggcaaaccctgagtttccgtgtccagcatttggccgtccgtcttatttgaaaaaattatgaaaaaaataaaaaggtaagtcacgcataaagtattaatcatgttttatcatctaacaacaatgaaaatactaatcataaaaaaatttcatataagacggacagtcaaacattggacacggaaacttagggtttgtctttttttatttttttgacagagggagtaggactgatcatagcatgtcgttgtaagtgtaccattttgtttgttgttttccatgtaagtttgtcactttgatgtcagcttgttttaatttgtaaatgaagaattgatgacaagtttgttttccttggggctttggtccataaatcagtactctcaattgagcttgtccgcagtttattgatgacaagtttattttcccatggagaccttgtctggcccaattttctcagcccataatttctattggatgattaatttagctgtaagaataaagaatagatttaaattaaaaatatatataaataattacaaaaatgttgctttttcacactgcaatttttcccatggagaccttgtctggcccaattttctcagcccataatttctattggatgattaatttagctgtaagaataaagaatatatttaaattaaaaaaatatagaaataattacaaaaatgttgctttttcacactgcaaatattggacctaaattaattcgattttgctatatctcactcgaaagattttttcttatctctcactcgattttctcactcaaatttacagtgcattttcttgtaagttatagtgtaatttatgaaacttacaatgtaacttttataagttacactgtaatttttgaatcttcgcatgtaaattttaaattttgtattggatttggtctttttcttgaggatatggtaatttagtgtccattatagtgtttcttaattgctttttgcttttattatatctatcggattttaatccaaagattaaaaatatgtgtgatacgattataaaaatctttcgaaagatgtataggtactcccaaattaatttatttaagtatagtcaggccttttcttttcttttactttttttttggtgcttttcattgtttctgtgggctttggcctctcagagtaggagatggtgagatgagatattgcctccatgattcgttatgtagctgttcctgctatcacaaatcggcccaagcccaagatatttaccatccccgccttttcgcttttgcttagccccttttcccttttgcaagtaaaaatctgccacaaataacagggccgaaaaaatccgactgtaaaagaagaaaaaaaagggtttgcatatgctcgaggtataataaggagcacatatgtccatcgcaaacacaactgtgcgtaaatcagctcactggtaggcatgtttgtagctgatgcaggatgaattattataagtgaaactgagtttataataattatttcaagacatagctgagtaaattaaatatttaaccgtatacatttcttttcacaaaaattaccgatgaagaaagtttttacaaaaatcaacatatactctcttcattcagatttaggactagattcgtttattagatctagtattaggttcatttattttcattcagatttaggactagatttgtttattagatctagtattagattcgtttactttagaatggaggagtactaatgatgaaccctgagttcctctcgacactcaaggctgttgttggcccgatctttcggtgagttgatgaaaactacgatttggaagaaacgttgacgacccgactacaaccgtacaagacgttgcgttgcgccttagcgatcgatacacctctccgtgagttgttgatcttgccggtgcaaatcaaccttattcctacaagcaaatcgaagaaacaagcaagaacaagataaaagcaatctgaattgcaaataggagttaaatacgaatgataagttggggttccgaagaacaagcagacggacggtctatccgacacgcgcgctgcaagcaagtagcaatggctaaactttaatctaacaaaacccgagaaaccctgaaggggtaactagctatatataggggtgggaggacgacctaggggtgcctagggtcgtgctccaccagcttagggcgcaccccacatgggccccacctgggccggggtcccaaatgaagttacaagcccataggcccattataggtgatgcaacaccttgttcctgtgattctggccacacgagatagaattcagagaagaggctggatccgttagaaagagggctccgagagctttccatcaagtactcacgggccgaaaacggaggtcgtatgcagattcggtggccgtttgaagtcagcagtgtagtaggtggccgaatcggattccagcacttggagtacttgatctcgatatcttcttgttcatccatgatgtgagcaatggttgcatccgtggtagccatggtcacatccatggtagccatggtcacatcaactaatgtaccgtttagaagcctagaatcgtccgtgtctgcggttatttgtgattctgtgaatcttagcaaccaaacaaaaattacccaaaattaaaagtggcagtcttacacgatctgatcattacttgccccaaactcaaggcaaaagtttacaaggtagtagtacatgattgatgatacataagttttgctccataaaaaaaggaccgattagaacgcatgtgattttcacgaggaaaaccacttgattcgtatgtacagaaaaacggtggaaacccctgtagactgacccggcaaacaagcatcatcagtgcatggatactggaccaaaaacaccataagaaattaaagagaacggagcaagcgagcaatcagccagctagtactagtacatatatattgtacagccgtgatctggtcggagatgagacgatgacccgccggcggcggccggccggcgcggcggaggcccatcgatcgatcacttgggcccccaaagcagcaggtgcatcaccttgtccgccttgccgccgccgtccgccgcgcgccgccccgccgttgccgccggcgtggccgcggccgcggccgcgcggggtacccgcagctgctggccggcgtcgcgcgccagcgcacgcagcgtcgccgggagctcccacctgctctcgcgcccgctgctcatggcgaatcaaccaccgctttctccttggcccttcttgctatgctatctagctcgtgctgctcatcctcagtccggtctcttctctctcccagccacctcacctagcctcttatactgccactgcactactcctggtcatgagtcacacacaattttacattttagccttttatgaacatttattttataaatagatctttaaaaaaaacttaatctttccatccagaaatataatatggtactgaatatgacacattccagcatcatgacgagtttggacagatatcttacaactaaaatatatccaatactaccttcattctaaaatgtagctatttctagcacagtactttgtcccaaaatgaagctatttttctacctaccttcccctctcaaccaatcacaaccattctttttcacctactttctcttttcaaccaatcacacaccttcttcaattattctcacatactttcttaatacccgtgctaacctcaaaaatacttacattttgggacggaggaagtatgatacaagattgctatatcatgtaacagatgaaatattctgtcaccgagctacaggtttgaatataacaatctaaagatgagatactagtactatatagttagaatagactcctttccgctctctcggagagactcatagctctagttctacatttttataatatgtaacgaagagattaagtccttggttagtttgggaaaaattttagatttggttggtatattggatatacggacacatatttaaagtatgaaacatagtttaataataaaacaaattacagatttcgtcagaaaactgcgagatgaattctttaagtctaattaattcatcattagcaaatatttactgtagcaccacattgtcaaatcatggcgcaattaggtttaaaagattcgtctcgtaatttacacgtaaactgtgtaattggttagtttttatccacatttaataattcatgcatatatctaaatattcaatgtgatgggtgaaattttttgttttgagagctaaaaagggcctaagttttttaaggatttatttataaaatatgttttcagaaaatggctagtgtgaaaagcccagtcctgagtcacctcctgcaaactgcaatcaacaggggcaataatagtcagcaataaatatcagccaccatgattgatgaacccctccaaaatcgagtggccgagagatacccaaagacgggatttttatcccgcacccaacgcctcggcgcgggatcaccacgcgcttggcgatcagtgcgtacagcgatcgcgatcgccggtgcgcgcgggggtgtataattttccacggcggcgaggggaggggaggggaggtcgtggatgcggcgaggcgggcggtcggtgtcgggaaaggggcgtggagtaatgcgcgtgtttgaaaaacggggtctctcgaccaatccggaatgaaccagtggttggatttgggctcgttcttccggtaaagggcatgttaagagaagtttttaaccagctgcaggttctctcggattctttagctatcccaaatagtccgcattattatttggattcagattctggtaatatataattgtaaaatctaaaaaaataaaatagaaactgtattaagctgaaaaaccaagtttcttcaggttataagaagctgactatcaaactaagctggctatcaaacagtagatttaagctccctgaacagggtttttgttgtggtagggtttttgttccattgtttgttatatgtcacataaatagttagaaaaataacaagttagattcatacaagatatatccgtttaaattcaacttctataagttataataaaaaaacacaaatataattgtgaatttacgttaactcgtttgaatttaatatgttcttttagttataacttgaagaagtgaaatttaaaattgcattttgtgagacgatatatcccatattaatttattttataatttttttcttaaatttttcagtgtccattttgatgagatacaataaacaagcagatgtttggagtaggggtggacattcggtctgaccgaaaatttcggtctcggtctttggtctttaaaaagtaaagatcaaatttcaatgcaaaaatatcaggaccgacaaattcagtctcggtctcggtcctgacccaaattcaacaacactttcatatacgcaaagaagcaatggaaattttcaatacaaaaatcacagaaaaaatgtaagcacttatgagtaaatactcttattaggttgtatgcctagaagaagtaggatgcgaaaaatagagtttaatcctattgaacatagtgattgtatgttacatttatacttttttttttgttaattcagtctttttggtctattcggtgagactaaccgaattgaccaaataaaattcggtttttcactttctaggattgaatttttcggtctcggtctttttggttcggtctttttctgaccaccgctacttggaggatgaaaatccatctcccgacacaagtcccagccaggacgcactaagcactggaaacagctgtgggagctggagtaccttgtagtctcgtcctttgctctatgcctgcggtgacaatgtgaggctatgagcagtaagctggtgtaaataattgagttagacaagtcaatagaaattagtagaattaagtagtaggagtaatggtatgtatgcttccggtcataaggatttaacttgtaagataaaggctaatcaaacttttcgtaagatcttgaccattagtattgccgtaaacctactatacttacaaactttttaaaacatataattgttgtttatagtgtttgacaaaatgtcatcctaaacgtcaaagcaacaacttgtttatttggttgacaaaacagtctaaatgcccttcaaaactttgaccgagggtgcatgtagcctcttttctggataaattaacaggatctgcttatatgtaggagagttcactggcctgttagagccaatgtgcttgagattgttgatgtgctccgtattgaagaagtggtttcggatggtccaaaatgtaacaaagaaaaacttatctaatccaaattaaaaagactgagtaaataatagttcaaaataaaattttaaaaataaaagatgatccaaagtgtaattcgctaaaaagaagaagaaatcaagaggagaagaagaaaagtacgtataagaaccgccaaacctggatgcatatcactaccattcaggtaataccgccttcctaacctatatgtgtgtaagtacgtacgtgcgtaaaagaaaagtagagaaacgctcaagggttttccgactagtttcacaaggtggtggactagacgacctagattcgaagccttacccattctaattatttgacattatgtccttccctaatattcgacctgagttcaaagcctcacatcttctaattatttgatattattaggtccttctataatattcgacctgggttcaaagcctcgctcattctaactatttaatattaggttcttccgtaatattcgtgatttttaaaaagaatagtacgttttgaagaagaagaagaagagagtagtacttaggaaccaccaacgatcccctcctattcgtccctagacttctctcctcttttttctctctatttatttttaaaaagtctcctctcctttttatggtgtagttggctcagcaataaccatagctgctaaactacaaatttaatttctaatttatttcaataattgtatttctcatgattaaatcaataatttaagattatgaaaaacagaaaatgaaccaacactatagctgtgtgtacatcatccaattagtctaaaaaattcaagataactttgccagagtagacggctaaattaccacaattcaggacacatgtatgttttgaaaaaaaatagcttgtagatctaataattagagaaattttataacttctaagggaaaaaaacaaatattaaccattggttttcacttaaaccggtggacctatagttaccactagattatgtatctaggaaacaaccggctaatcccaccttcttaatcccaatcctgtacgtaagtacatatttatgcgtgtaaaagaaaagtacatacttacgaagtactgccaaaccccattcccgtgcaattcgttccgtttgactcccctgctttctatacggcatagttggctagtcggctattttctcgagtaagtatcttcttgagtaggtaagaaatagccaactttgccatatagataggaagggagtcaaagcgagcgaattatttgcattggcacggactatggataaaggcgtcgcggggtacacaaggacgacgacgaacaaaaacggattgtgacgatcggaaaaaatgtgtatcattcaattttaagatgaattccaaactaaaattggtaacttgctaaagattcgatgtaaattatataatacaagaaaataatattatatgacttaactaggctagaaaaaaacttagtactctatacaacataattttatcgtggtattaacatattcgttatagtcatccatgtgagcggtttaatatatacaactaaaattgcctttccccattgcaacacacaaacttttttcctagtcttttttttattaatttagtaaaatttatctgaaaaatgactgcatattagtgttttgtatatatattagtgattttaaatgttgaggtttgatttatggtacgtctcagatatacacaatatcgtattaaagagagggatacgtgtgagattacatagctataaatacgatttggaccgttcacctacaaactactatacttccactatttgattgcatggctcgggataataaggttgaaggacaacaaattggcctgtgaaacaacagttaatttgagttaattaatcttagtatttttatttttaaaacgaaattaatctagattttttaacctataacatggctagctagtgaccagcgacaagcttgaacggagtatacaaccgcttagagcaggtacaatgctataagccacctataaacacatatcgagaagataaatgatgatagagaagatttttatcagtgaaatagtgaatgacgctatgattatacatgttaaaaaaatatgaattatcaacttcaaattaaaaaaaaagagcattgccgaaacataattaggatgtgagtcaaggatgaaaatgagttggattcggacaactaattgatgtatcatattctattccacagtatcttcatggagatttagacaaggcacagataatagaaggtgtgaatgtccgaaacattagttttttatatataagttttttgaaaaacaaattatctaatttcaagtttataataattaataattaattaatgatacgctaataatttgtctcgtttcaagtgttggctaagatcaaaccgatgtcccgaacgcagcttttagattctgaactcacgagagtctttaggttaaaagtcatgctgtggagctatagcctaaacaatatcgctaaatatcttttttttaaaaaataatatatcctacaaattctcaatcaccaagtatcctacaaaaaatcaaaatggttctacactgaaactgcatttttctacgtaccctcacataactgtggtaaaaacaaattgagaacataaaataccacacaatctacattcacaccatatgccctgatactttttgaactttgttttggaagcactctactactcgtctactgcaaaagataaagaaagaaaaacaaatatagcctagccacatatgctgaactcaactcacgttaaaaactaaaacatttgtctttttcgtttacctagattatgtttaaatataattcttggtggaatagtacatgatagtatatttacgtaaaactctattataatttttcacgattatctttactactttaacctctcctattatccataaaaaaagaaccggcacactcaaaggagtgaaaaatattattctacatcttattgtaacgtaaggatatggtattagtttacattagaccttattcgttcaatcaaaaaaaaataccgaggatgaaattttcacatcatatatgtgaaataaattctactttcttcattctaaaatgttgcaatatagaacgtgatttaatgataataaatctgaaacaggttacttcctccattctaaaatataataactttaaaaaacggaacacattataatactccatccgtcccaaaataagtgcagctatggttttccgcgtccaattttgatcgttcgtcttatttgaaaaaattttgaaaaaaaattaaaaacataagtcacgagcaaagtactattcatgttttatcatctcatagcaataaaaatgctaattataaaaaaaatttaaataagacggatgatcaaagttaagagtgaaaactcatgactgcacttattttgggacggaggtagtactagaggtcaccccgcgcgttgctggggaaatttaagcaattacaaatgtcaaaattttggatgaaatataatcaccttaaaaggaaaaacctaacccaatttatcactgcgcgtgaggaatatttgtacaaataaaaataatcttcaaccgtaccaagttcatagcctgcaaataatatttttcaaacgtatggcttcgatattggtaccattaattggagggaaactcaactggcactcccttccactcatattatacaaaacaaattaagggaataagtaacaacaaattgctaaaagaaatgttgatccgctggagcatgagcatatatatagcggcaaaataaacgcagcagcatggctaacggaatgaaggattgatcgcaacgatcaagtatagcaactggactctggacaggagggcttgtggtcagcatgtcaatccactgcgatggtgttttcagaggaatcaggaataaaggccgagtattcacctaattcatttagctagaggatggaatatatgcagtgcaagtgcagtggaagatggaaggcctgctgcgtgagccaatgaatgaatatccaacgttttggtttcaatcaggagatgacccgtcaggaacaaacggtttaactgttgaataggcccctttgttaattactgtcgtgcatgatgatcggaattaaaaaaaaaacgaagaggtgcatcccactatcgctctttacaccctcatttgcaatctagcggctaggtggaatctatctgcaatccaacggtcaggtggaatagaggtgatgtggatcactcctggagaaggaaattagttttaattgtagttagtgggatgacctatatagatatatatatatataggatactgttcttattcgcaatattaaaatatatttcaattatttaaaaattgtttatatttctggacagacgaaaacaaacaataatccccgtgtcctcgcagtgaggctcgcaccgcccagcatccttggaaacagagtgagcgtccaaaaccggcggcgacgcgctccccgtttcgccgctttccgctcatctcgcgtataaaaacatggcgtctcccctgaccaccacgcctccaccacctccgcatcactagcaagcgcaagcgccgcgcactgtgaccgagcggaggcggaggcggagtagccgggtcgggaactcgggatggcgatctgcggggcgaaggcggcggcgccgtcgctggtggtggcggcgagcatgggcgccgtcgaggcgctcaaggaccaggcgggcctctgccgctgggactacgccctccgctccctctacctccgcgccgccgcctcctcgcccaggctgcgttcccccctctccaacaccgccgccgccgccgcgcggccgccggcggaggaggccgccgacgtgaggctgcgcaaggtccaccacctcgtctgctggggccccaactgatttatattatatatactcatctcacatcttcctgaagaacatatgccactcgtctcgtcgtcttcctctgatctctgtgcagtgtagtgctcttctcttctcttttagctgtgttgcatctcgatcgatcgcttgcttgattgctccatcctccgtctctgtgatctgcatgttcagtttcgtgcagattcgacccgtttgtgaaaatgttctgccgcttacatgtatcttcatccttatgcatggagatctagctagcctcctattccctctgttccgaaaataaaatcaacttcgtacgagagtagactggagtccttgtagccctccattttctcatttactaattttggaaaaaaaaatcagtaccatcttgagatcttgagactggacttaaaaaaccaaattaaagagaaagagaatatgttagttaattgcatggatatatacatgcttgtattataagacatctgaaaaaatagttacgtcttatgtttatgttttgagatgaaaggagtactaatcaagtcaagagcgccttaatttcagttttgtcatgtctaattaccaaatcgagatgacagtatttgaagacaagaagggatgtgataaagctacaaacctgggacaagaacgcatcttgtgagagtgaagagagctaacttaccaaatgcatccctgcatccatcccctggttctcatatgaactttgtcgaatctacaatgagaattgaaaactaatagtactataagatttatggatatggatatggattgtgtgtgcatctgatgaactagcacaaactaattaatttcccctcagagagagcaaaggcgtgattgggtgcagtgctggtgaacctttgagccagtttcagactttcttgctaattaatttagccggccggcaggttcatcaacgctgcactcaataatgccttcccttctcttccatcacccatcgatctcatcatgaatctgccaatattcctagctctaaatctctaatcccaggaacaggatgcatcacttggctaggcagcttccatgcttgtgcgtgtgtagctgcatctgcactgcatttgtgtgtgtgtgtgttgcttttcagacaggtcacctcctccttttgtactactgcatctgcaccgtgcctaacggtgttgcttgtactaccatgggatgcagcagcatcctcggattgtactaatttctatgtgttgtactttgtcacgtcctgatcgatcaggtagtacgtactactaattcagagttcagactttagatgagctctctaaaattccacatacatgtaatacttgacagaaaaatgggatttttcttatgagtgcagcatttttcagaacaaaagaatcatgcatacgcttctctccaataattcagagttgtggagatgatttgaccaatacaacgatgaagttttaggcaggcagtacagcatgaccgtgaccgtcctgaacctgggcggacacggcaagtacagactatagagcagtacaactacaaactgtactgcattacaatttgcaagttcagaatatgagtgcctgtccttttctgattaaagatgattttatctcggtttctgttagcaagctttttaaactactaaacaatgtattttgtacgataactttccatatatacgttgttttaaaatatcaaatatattcatctgtcaaatttgtagtaattggaacttaactaatcatgcttccgttttacatgcgctaactaatctttatcaataatctctttgatagtgctagtagcctagtactaatactttgtcaagcagtgtcgcaaacgaacacgtaaaactatgaatacgatagtaggagtacagaataatgtggtactcgctgcattgaagtttcgggtttgtataggctaaacttcttcaaatttgaccacgatcacaaaatatatagtctcttctagaagacgttttgactttggtcaaagtcaaaccactttaactttgatcaagtttgtagagaaaagtagtactaatattttcaacccaagacaaatttattatgaaaaatatattcaattattgatttgatgaaactaatttagtattataaatattattatatttatatataaacttagttaaatttgaaatagtttgactttgaccaaagtcaaaacgttttataacctgaaacggagggagtactatatagcagcatctaaccacaccgaattagtttcatcaaatccacaattgaatacatttttattgtgtatttgttttgtgttgaaaatgctgctatatctttctataaagttatcaaactaaaaagtagttcgactccaaatttcaaattctatatagaagtttaataaaaggaaataaatctatttttcaaatttataatagttaatatttaattaatcatgtgccagtgagattattttgcttcgcgtgtagtacaaatcttcctcatccaggaggaattagctccaaagaccttcttttcttttcttcccacagaaaagttagctctacagatttcagaactgcggatttgcagtatacctcagtcttgggtccagtacacagaaatgataaataactacaactccaaatttgaatgtgcaaacatctcgctattgccaccagggcatggaagatgcagaattggtgagcttgtacttatctgttgagaatttacacgaatttcctttcaacaaataaaaacagccgtatgctaaagtaggcttctgaacaatatactagttttaaagtttcagattatctgtatactatggtccaaatacaaatcgtgcccattgtaatcaggatgtttcaagtacttacaaatagtcccaatatcagaacgaatccagaaggggaaaagaaaattctcaaacgttattattgacaattgatatctctggcatggaagtgtcagcagcacccagcacagccaaagaaagtaactaaaactaaaaaggctgctagttcatctaaaaaaaagactgcgagttgccctcaaaaagggggaaaaaggactgttagttgaaaggtaagttatagatggccagaagctaatggtgcatcatttgaacacctcacatagcaaagaaattccttttgatgcaccagaagatgatcctgtttcactgtttggcacatatatgaacatacactgtcacttagatcctaaaattatgcatgaatgataaacatgaagaattagactatgatgctgaatcctagtgagatttggtacccagaatttgcccagatatttgtttgtatgtgaagaggtcttgatgacaaaaggttaatcacattacaataattatctacttcctaggccgccttcgccatcaacaatctacaaatatggtatcggttgcatgcaaaaatttacatttggactggccaacatcgttggttacactgaaacaaactcctgtagtgcacagttgcttgactcatatatacatgttccaaaattgactcatatatactttgtatccttagtaaaaatggaatatacaattatcagaagaaatactgaaatgtaaagaagctagggaacaaaaaaattaagccaaatggtacgaaatggagaaactagaacagggtaaacctgaacaacgatccaatgtatgtgaacaagttgtgactctggcctctgatggaacaagctctgcagctgaagttgtattgtaaacctggtcgtggtatttgcaactggtcacatgttttacaggcggcaactgcgttggcagcctgtcctggcttttgtcggcaatgtagcggattaattagccctgtggctgctgtgatggtaaacgtgacggctgctgctctccttgcattccttgcatagattgctcaggttgctggtgctgacctccttgccatgcccaaactatatccttaagtgcaggccttatatcttccttcatgagcttttgatattctatagtgtccccattggactttttaaattcaactaaatggaaagatggagcaagctcaaaaacctcagcatcaagctcaagtaatccttttattccttcctttggtgctaccaacctcagaaccccattttcttttttcttaattttgagcttgaagcgtctggccaattcatttagcttagcaaatatagctgccgccggttgcctagtggtaaatctctcttccctccggccatatctttcttcaaacaaattggataagtcaaacccggtagacagagaaatgatgtcaaacgcgttcaagttcgggaggcttaatgaagcttgctttccatcggaattactacattctggtgagtcagaggttgtggcttcaccattagtgtacactttgtctcttgatgacgcacgatttccctcaaaaatactgcattctgttgtgtcagaggttgtggcttcacccttatacaccttgtctcctgtttcatgtttgctcttcagtgcatttacatcactggattttctgtaccaagcgcttctctttatcttcgggatagaaattctagtacttggatctggatcaagtatcttatatagcagatccttcaactcagcagaaaaggaacgagggcatttgtattcagctttggcaatctttctatacatctctataagatttgtgtcatggaaaggaaggtagccagatacaagcacaaacagaattactccacaagaccatatatcagccttcgcaccgtcgtagcctctcctactaagaacttcaggagcaacataagctggagttccacaggtggtatgaaggaggccatcatgtctcttggactcagaaagggcacttaaaccaaaatccgagacttttaagctctcattctcatctagaagtaggttttctggcttcaaatcacggtgataaacaccccggctgtggcagtagtctataccactgatcaactgatggaaataccgcctcgcaacatcttcactgaactttcccttggatattttcttgaaaagttcaccgcctttagcatactccaaaacaaagtaaattttgctcttgcttgccatcacctcaaaaagctgaagaatgtttggatgctttactaatctcattattgaaatctccctctttatctgcaccattagcccaacccttgttaccttctccttatcaatcatctttattgcaacggcctgtccgcttgtgagattccgagcataatataccttggcaaaatttccctgtcctaactgcctacctatttcatagcgatccatcaaaattgtcctcctgtcatccattgtagcaatctatttcaagaaaatcctctaggcactacttatagaacaatatatttcaaaagggagggcttataaatgactaaatgaacactatcaccaccaaggtcgtgtccatcaaagatataatgccacgatcttcagtggttcagagaccagggtacagaaaaaatcattataacagcatgcaggcactgctcttatttgaactcaaccggacagttggtgcaaagctttccggtgcactagcacacaattcggccttttcaaggacaaatatcttctagtgtcacctgttgaaaacaaaacggagaacgaacaaactgaatcagggcaaacatataatgtgaatgtagatccaatcatccaaaggtaaatcaaattgaaaacaataattcactgtaaatgcgcattcacattcccttttttttatacgcaaggagcgcatctttgtattaaagagtaaaattatttataggcacattcccaaagttaggatagcattacgaatttagtaaaaaaattgcaggattccccatttcactatgattttgaatacccaccaagcattccttgtaagaaacctaaaatcacaccaaacaaaacatactccaaaacgacaaaatgacaagtactacaaactaagcagtgattcatcctaaaaaggtagatcacacgacgattgatctagtgttctaggacttcaggctactccgataaaggaatcaacaaataaaaacctgcagaatccattcattcatcaatccccggtagcagagcaatccatcatactagggcgaacacccagctccccaaaccctacctcaccgggacacagagctacaaatccagccataaaccaatcaaactaacaagcaatttacccttctcaggccttagccgcagagatcacaaccacaaataacctaaccaaaccaagaaaccgcagggagcacaacatcagctgcagatctctttgcggccacatcaaaaacaaccaagcaatcaccaaggctgatactaccaacctgagatgaactggccgcggaggagaggcggggatcccgaatactcaggtgaagtctgctccaatccaagccggcgcagccacagcgcagccgccctgcgctttgacctatttgcaagcacagcctattaatattttaattaatttttaattacctttttttggttattttagtagaggagtggcatctccgctccgcgtcgcagccacatgctctgatgcctccagagcacagtccacgttcgcacggcagctcagctctaagcagcgcaacgcgtcatcacgccgcccggtgggccccacagccgccacgggcctggttggtgggccgtagcccacgtgggcccaccggcggcaaggtgggctttctcctcgtggcccaactggcggtggtgggcggcggatggcggaggctggcggcggcggcgtaacagaaggagaaggtggcggcggtgggtgcgggaggcggcggtggaaccggcggcgccccccaacggcggcgcacccacggcggcgtcggcggcgcaccccacggcggaccaacggcagttggcggcggcgatatgcacggcggcggcggcggcggaaatctcgctggggcggttaggattctaaccctaacccgccccctcccccacctttttgcctgccggccaaattgggccggcctagtactgttcggtggtgggctgaaacctatagtttcggcccaccacccaatttaccctttttttgttttaaatttttatttttagcagccattacactttagtccctatgttttatgcaatttaatagaaacagttcatcagttgttcacattattatgtaatggtcctatagatcactgatgttatgtgttaattaacatagatgtttattcaaataccccgtttcactaaatttatttgttgtcttaataacatgccttttgcatattatttcaagacacactctactttctcgcttcattaatttataaaattctataaattttgtactttgatttagcaaattctcttaattatgtgcaacatgattaatggaggatttaatgcatgttccacttcacattttgactcggaaattaatcacatgtagatggagtcctatactttggtcatcacgaccataatttaggcagcgagtatcttgctcatcatcaagtggtctacattttgagatgattacccgatggagccctacaaattggccgcactggttataacctaggcagcgagcatctcgctcatctcacagaggtttacatctcatgatgattacccacatgtgttattttccgagcatatgttttgaaaaatgagattatttgaaatttgattgaacacaaggtagtggagtcctaaacattggctgcggtatattcaccagaatatatttgcctggagaccatgttttaggcagcaagtataacttgcccactattaagagatctactccactgtttaattacttggagattatccacattgtgccacctaatttcaaatcctaactcaaattgtcaggtctataacctacatcttttcgaaacattacaagatatgaagttttacatttcgcattgagattacaacctcaatatcatgtttttattaatttacctctgtaaattaatagtgttaatcatgattatagggacacggcaactatagagttcaccgaactcgccctcgatgggagtaactacccaatttgggcttctgatatcaaaataaatttttcttctagtgggatttcacatacagattaagaacccaatgattgggatccaccagttgagaacagaaaactatatattacctttttccttctgaggttctatatctataaagatctcaaatatgagtacatgttggagacgagccctctcaacctatggaaagctctaatagagcgttatgatcagcaaaaggaactcatttggccagaggctaattatgagtggattcatttacgcctacaggattttaaactgtggccgaatacaatcatgttgtacataacatttgctccaagttgatattttgcgataagagccaacggaagcagagaagatagagaaaactctatcaactatgtttccagaggacaagatattgaaccaatagtatcgcactaaaaggatttaagggaaattcctcgaatacccctacgaatctgactggaaaacgcaaacgcaacaacaggcgcaaatccaatggtcgacagaaaggaaataggaagggtaaggcaccacaacctcgtggcaatagcaacatgcattgcaacaggtgtgtatctgactatcatgtcactaaagattgccgcatctcaaaaacatcttgttctcctgtatcagaaatccctaaaggagaaaaagtcttctgaggaactaagatttgaagctcacttcaatcttacaaaagaaagacctgaggttgaaagttctcactaggctcctattgaaccagagaacaccctcgttcttctcccagaggataccactgcgctttctgcaatagatgatatgctcatcgaatactgctcaacggacccacttagagatttattgtaatctcagtgcgtcccacttagagataaagctgctttaatctcagtgtgtttaagacattatattgatatcctatagtttgtcaaaacaatattggttgtaataagtagataagtacaaactcccttatattataaagttgtaagacttgatagtcattagagtatgtactattaacctatgtaaacgtcatactatgtatctgatgttttcattattgtatgtatgtatatattgtggataaagaattcttcactaagcaattcttctttcactatagatgtctaaggatatcgctctgaaattgtccttctctcatccattgtagcaatctatatcaagaaaatcctctaggcactacttatagaacaatatatttcaaaagggagagcttataaatgactaaatgaacactatcaccaccaaggtcgtgtccataaaagatataatgccccgatcttcagtggttcagaaaccagggtacagaaaaaaatcattataacagcatgcaggcactgctcttatttgaactcaacgggacagttggagcaaagctttccggtgcactagcacataatttggctttttcaaggacaaatatcttctagtgttacctgttgaaaacaaaacagaaaatgaacaaaccgaatcagggcaaacatataacgcaaatgtagatccaatcgtccaaaggtaacctaaattgaaaacaataattcactgtaaatgcgcattcacatttctttttttatatatgcaaggagcgtatctttatattaaggagtaataaaagttatttacaggcacattcccaaatttaggatagcattacgaatttagtaaaaaaaattcaggattccccatttcactatactttgaatacccaccaagcattcctggtaagaaacataaaatcacaccaaacaaaacatactccaaaatgacaaggactacgaaactaagcagtgattcatcccaagaaggtcgatcacacgacgattgatctggtgttctaggaatctaggctactcctataaaggaatcaacaaagaaaaacctgcagaatccattcatttatcaatccctggtagaacccgtcatactagggcgaacacccagctccccaaaccctacctcaccgtgacacagagctacaaatccagccataaaccaatcaaacaagcaaacaatttacccctattaggccttaaccgcagagatcatagccatgattaacctaaccaaaccaataaaccgcataagcaccgcatcagcagcggatctctttgcggccacatgaaaaacaaccaagcaatcaccaaggctaatactaccaacctgatcgagatgaactggccgcggaggagaggcggggatcccgaatactcaggtgaagtctgctccaatccaagccggcgtagccacagcgcagccgccctgggctttgacctctttgcaagcacagttctattagtattttaattattttttaattaccttttttgggttattttagtagaggagtggcatctccgctccgcgtcgcagccacattctctgatgcctccagagcacagtccacgttcgcatggcagctcagctcacagcagcgcaacgcgtcgtgccgcccggtgggccccaccgccgccacgggcctggttggtgggccgtagcccacgtgaggcccaccggcggcaaggtgggctttctcctcgtggcacaaaagtcagtgtgtggccgtggcgaggccggcggaggcagcggcggcggaggaggaggtcgtcgtcgccggcagctcagctcagctcacagcagcgcaacgtgtcatgccgcccggtgggccccgcccccgccacgagcctggtgggtgggccgtagcccacgtgggcccaattgacaaggtgggctttctcctcgtggcccacaagtcggtgtgcagcggcggcgaggctggcggcggcggaggaggaggtcgtcgccggcggccgcgcggtgacgggtgcagtgaagttcggcgcgaaacctcaagagcaccgcattttctacgctttttctttgtttttttttttggctcgagtgcgccttcgccgaacagataaaggccacgtcttttcttttgctttctcctctccaagcgaagccactgcttctactgcgtcgacttggaattttgccgaatctttttttcctatgcatttggcaagaccaagaaaacaaaaagaaaagagattattaatcatggcgacacgaatggaaatggttaataatcgcattgaaatctaaatccgatcctactaaagaattaattaaaaaataggagtactaataatgggcatagatagagggagacctcactctcagcataaaaaaattccatctttgcaggcagacgcaggtgcacttgcttcagtcaccacctcctcttctcctttgccgactcctgagccatcagtgtggcctaactcgtgtgactttcaaagtaagagtatctacgacttcgattcttttattgcctttctgattaatgaatagtggtaaacgaagcaataggatttgactcctggagaaggagaagctaagatagcactgagctctttctagatacacatccttctccgcggccatttcttggagcaaatctcattttgcacagccccaaagatttcttcatctttgaaggcaaaaaaaaagatggtcctttttcgagggaaataggggggaagatggctatgaagagagtggtgtttctgttgctgcttgtggcggcatctgcattggtgaagtcgtcaagaggaggaggaggaggggaggagaagttggggaagttctatggatggcggcgccatctttcttctggaccagctgcctcttcgttggttctcagtggggatctcgtaaggcgtccataaaccttctcctttgcatgctagatagaagtaatcgattcaatagctctagtttactttgcttgatttggacttgttatctgccaagaacttcgaatatgacttccattttgtcttcttgaaagtgaggcattcaggccttttttgttatttaccgttgttatgtttagtatatttcgttataacagaaatatgactgattgtttcttgatctttattgtgctcactttagtcaatcaggatgagcagtaaattttacttagttcatatatattatatgagaacaatttaacagatagcttgatgcattaacaaataatccttactgtgatgcaggtagacaaaatatggtcagtttgcttacaagacatagttagcccagaggatacatttggctttggggaatcatttgcctgggatgagttatcgagtcattccacggaagatgaactgaaggcaacactgttcatggaacttatggctcttcttccacctgagaaatcttcttttacttatgattgtatccgtgcaaactgcttcagcctgggtgttccacaaatattcagtgttgcactgagcaactatcttgagagccagaaatcattggtcggttcaaacttctatccgagacggcgtttggtagataaactgatcggagatgctccttccatggctccagctttcgcaccatccatgtcctctggcggtgaagttcactctcccctctctgtggcggaggcaccacttacaccttccaactctctgaacatggaacctcccagcccatattatcccagtaaatctgcacacaagcatcagggagtggcacctccagtttcaccttcagaggagtatcatgactacatgaaagtagtcttgatcgctgttcttccaacagccgcactctcattcctagctgcatttctatgtttctactgctgtggatgcaacaaaagcaaggtctcggttggcgagcaacgagatgaccatcctcttcttcacttgcagttctctaacttgcctggtgaggatacatcccttctatcaacatggtagattattattggtatggtagtatatcatctatcatttgaatggcaggttcgtcacctgatgtgcatgttcctgccagcccgcttcataaggatgatcatggggttaggccatccaatgctggtgtaagcatgagcaagtgctttccatgttgttttaaaacctcaagtgatgccacaacacctacactagtaactggaggaacacaggagaacaatgccacaagtgatgcccctaaactgatgcctccgccacccccacctcctccacctccacctccacctccccctccacctcctccgcgtccacctcctccgcctccacctatcaagaagggtgctccaccacctgcacctcctaaagccaccatggcaagatttcctaagctgtcacctacagagtcaagtcgttctgaagagtcatctgcaagcgagctggccagtgaatcgtctgaaactgaggtgaatgctccaagagccaagctccggcctttctattgggataaagttcttgctaatcctgatcagtcaatggcctggcatgacatcaaatttggttcttttcagtaagtttttaaatttagcaatggcatgtattctaagttcatttaggcttgcaactgacgactgcattctgcagtgtgaacgaggagatgatagaagaattgtttggttatggtgctggcaaccaaaacaatgtcaaggacaaggaaatttccattgcagatccttcacctcagcatgtttctcttcttgatgttaagaaatcatgcaatctggcagttgtttttaaggcaatgaatgtgagggcagaggaaattcatgatgctctggttgaaggtagttgaactattgcatatatttacatgcagcctacttacccatttgccaaaaaaaaaaaaagctcctaaagtttccattatcgctgtaaatacaatatgtttgcaccgccaaagataacattgcacttataaatgagccttttgaaaaaatggaatgctcgttgcattctatttaactgatacaagaattcgactgcaactatagcaagtttacttattaaactatatactgtgcatttctaagcacatgtatttgtggccatcctcttttagtttcttgtctgtctttgtgattgtggcccatctcatttcatatcaggcaatcacagtgaaaacatgtttcatattgtgtatgcattggtcatttactatatcatatgttctcttgttcactagatgtagctgttgaggtctaagtagtacacacaaagttgatgctgtgctggttcacttcaatatacttctgacattgtcttctgtcacattatgttatgaagggaatgaacttcctagattacttcttgagacaatcttgaggatgaaaccgactgatgaggaggaacagaaactcaggctttataatggggactgctcgcagctaggcctagcagaacaagtgatgaaggcactaattgatattccttttgctttcgagaggattagagctttgcttttcatgtcctctttgcaggaagatgcttcaagtctaagggaatcattcctccaattggaggtaatccatctgaaagtagttgacttctgtattaaatctgcgaagtattccaaccttttttctccaagtgttcagttttttatctgtttgtgccaggctgcttgcggtgaactcaagcaccgcctttttctgaaactactagaagccattctcaaaactggaaatcgtttgaatgatgggacgttccgtggtggtgctaacgcgttcaaacttgacactcttcttaagttatcagatgtcaagggagctgatgggaagaccacattgctgcactttgttgttcaagagatcattcgatctgaaggtgttcgcgaagcaagactcgccatggaaaatggaagaagtccaccatttcctagtacttcggatgacaattccaatgaatctctacaggaggatggcaattactactccaaccttggccttaagattgtatcagggcttagtaatgagctggacaatgtcaagagagtagcagcactggatgctgatgctttgtctacaagtgtggcaaatctgcgacacgaattattgagagccaaagaattcctgaactccgacatggcatcgctagaagagaacagtggattccaccgctcgttagaaagtttcatagaacatgcagagactgagaccaattttctcctgaaagaagacaagagattgaggatgttagtgaagagaacgattcgatatttccatggaaatgatgagaaagatgacggttttcgcctgttcgtcattgtaagagattttctggtgatgctagataaggcatgcaaggaggttggtgcttcacaaaagaaggcaacaaataaatctcaagccaatggcaactctaataacccatcatcccagtcaaatcctcaggagcaacagtttcctgctgttttggatcatcattttgatagctcagactctaatgattgaagatagatacaatcttagatactaagatacatacattatgttagatattttatattttttcgcccgagaccatgtaaaaagtcccatttgcagaggcattgttcatacataatcacattcacatagatagatttgaaacttcatacatgctattatgctataacattcagtatcaaatctgaagttctgaactcagcctatcgttagattctattttctttggtaagagtattcatatcccgacccctccccacatgtgtcatttcccagatatttttattttatttttaaagtcaaaccttttcttttcattttttgaaagccaaaacattttcaaccgtgtgatggaaaccaaaaccttcagcaccctaaagacgaaaaaataattagtaggatatggtatatttcagaaaactggatctattttatcaatctatcactttgctacaatgttatccacgtattttaaagaattgcaatattagtgtatggttttatcaaaaagaaagatacaacttaatttgtgtgacaagtttaagtccacatacactgtccattataaattgggtatatgtcatactagaaatgtggtcccgtgaccatggtaggtttttactcttttagtagctttatatagtccagttcttataatcatgtgtatagtgttgggcaaaactatatcccatcaggtagatgagtttgggtccattctatgagcacccgtcccgtctaccatgggtaaaaaacactcgtagatctagcgaaaaaaaattacagtggcctaagaccaaatcttagtatgaaatcatctcacctaaccacctatcaatcctaccaatattctccattgccacacaaaccgcaagtaaaaggcagtgctcgtggtggcggctagaaccactcatgactcattatgctcgtgagttgctatgcgaccaagacaagacaagggaggtagcggggctcatgcggttatagggggtagggaaaacgggattgaggagtcacactctcatcacatctctagtctccttcacatcagtctcttaccatttcccattccaatcggtggtggatccaggtacggaggaaatcttgtacccatgacaattgtgggtgttagagcaaaatgttttgacttgcataggtgtgtgcggggtattagaactggcgggtgtatttgctatatttagtcttacacacataggggataaattagtagttatatgataaattccgttgctaaagttacaattttatgaaaaatagccagctaaagttatacaaagtgatggtgtttgccaaagggagtatctaaagaattgccacaaattttttgagtcaaaaactttcagatataacaacttatataaaacttgcattcaactatggtttagttagctaatattgggatcttacgtgtgatatgtgtgaaattttttttccttcatgcacaaatcgtaggacgatccgatggtcacaaatttggaagttttgggagtagttattttagcaaatccgttaccaaataaggctgtgttcggaggagggggttgggaacccctcctcctcggcacgcaaaacaaagttcattttattgcatgatcaattaagtattaactatttttttaaatagattaatatgatttttttaaacaactttcatacataaagtttttatataaaccacaccgtttagcagtttgaaaagcatacgtacggaaaacaagagaggtgggttgggaaaatgggggaagaacacagcctaagcagttttgtgaaattttctcgataataggataagatcttctaggatgcacaatcctacccgtccatttccgatcggacggcaccggtgacacccaagagcaacccaggccgcctcctctcccccaaaacgcgcactcgtgtgctttcgccttccattctccaaaccctcgcgggagatcggaattccccaccccggagcgccggatccaccaccgatcgtcggcggcggcggcggaggaggctgcgacggcggaggcggagatgctgggccctcctcgccgcgggccggcgtacaagacgaagctgtgcgcgctgtggcagcgcggcaactgcaaccgcgacacctgcagcttcgcccacggccacggcgacatccgccgcccgccgtcctcccgcggcgccttcacgcaccacccgggtatggattgcccccctcccccctcgcgcgcccccctgttcgttgtttgtcttcgagatcccccgcccctgggtttagggtttctggtgtctagtgcaggaggcggagggcgttggatgtcctagaattttttattttatcgtcgtgattgtcgataagcttagattagatgtatgcgttgctagatggctagatgtgaaatggaagtgcggaaaccggactattggattatgtcaagagtagtattttcacaaaagccgagtgataatgttataagagtgagcattggaagtttggaactaagcggctggttctggagaacgtgacatactgggcggtaagcccgaatgcgatgtttggcttcccatgcaaaaaaggaatgtcataaaaagtggaaattgctggaatgttgccttttaagaggacattcgatacccatgaaggagttaggacttaggagagaatccagtcattgctgtaaaccttctttatgattcgcgcgatagtttgctggcttttttgtcttgttctattgcgtttgtgatttttactgtatttcttatacgagtgcttgaattcaaccaccagttgctgcagatagaaaataattctaacaagtggaagcttgttgcagaattaggtggcattcttactggttgtcttttgatttaattatcattcaaactagcagactctgcagatatgttgactcaactgctgccagaggatagcatgacctttttcataaattcttcacttggtatttcgacgatttgtgttgacgataatgcttgtgctgtaccagaaggtgaacttgtgaggatcttggatgatgcctccattgaatgattgccaataatatattcaatgtgatacaatcatgccattagctggctttgcaattactgggtcacacattatatgattatggtgcatcagctagttccattggaagtattattctcactggtgattcaaacattttgtgattcttcacaagtcgccattgaagatatctgagcaaatgctagtatatgtatgggatattgggactatgccattatggaagacctttcttcatcatacttgctatatgaggttatttatggagcactcatccatttcacttcagacgatcaacattattatattaatgggtgaatcagtggtttcttgtcgtatcttggtatatgcttgtgcattattttttggccctactttttttgtggctaatggcattatcctggagccccagctacttattgctaattgaataatcttgtagctcaatggtcttggtaagcttaacaggattatgggtgtcctactatctatatattacttcctttttgttttttgtttcataagttgcttcctttgtataaaacttgcacctccctgacttctagggagaagagattatagagccggtgatttcagaggcaggattgataggaggttttcacctcggaggaggcattcccctggaagagagtccaggggtcatcgtcccctttatgatagaaggccatcttctcgagaaagaggtaataactgctttctttctctgtcgtgtgtgtatttgcatgtgtgtatacaactgtttctggtcgcttctacatactgattgcttttaagtttatgctatttataaactcataaaaatgtgatttcttactgcagattctagctattcacgatctcctagcaggaagaggtacatatttcatttcatcatatgagcatgatcttttgaagttaaattctaaatatgctgtgagtgcatgttaaagccctgatcaaagttcaatttatggtgtctttgcttatctttatcatcgatttattagtatattgccttgtcgtgtttctattggtcttgcattttagtttttcatcattgttaatcaccatttgatatgcttgagttaagatccacacaagctacaattttagttctgtagttttatattaatggtgctgtaaactatcatcaacatatttgttccattataatgctaaaattatcttgctcagaatggtaaggttttgtattcttcctgcagattgtacctggtgatacttactatctatcactcaaattatttgttttgttttcatagtcataagcatgttttcctaaaggtcatgcaagcacttgtataagctgtattttgcgatcaaagtagaacttgatatttgaacactggcatttccgttggaattgtggttgggtttactagatttattctagatgccttgaacatgttgagtcgtgctgaactggtaatttacttttccacaatctatcctttatttccagtgagaggaggcatgaaaagaagactgacgatggagaaaccaactcatctaggagtttaagtctctctgataacaacgatgaaaagaaaaaggacaaattctcaagtggtgatgagaaagaagaccacgaaaagcaggtatgagaaaaatgtaatcaaattcatggcttatacaagcacatttggcacaatcttcattgcataattatgaatattgtgcagctgaaacaaatacggctggatatggaggctttgcgtgacgataaaactcagatggaggtcagtttctatttgtctcgctatatttgttacaatatggcacatgctaccatgttaacattttgactgccactttttattcactcataaaaaggagttggtggttgtgatgataggttccaccatcccatgccattttaaaagatcttttgtggatgaatctaccttagtgtgtgtgtgtgaattgtaggatcttttgtaaaggattacatcttctgcacatgtagacatgcataagatgatcgattgacgcaagtcatatattctattttaaatttgttactaatttgtcatatgtagacatgtatttttataaaaaagttcaaaactaatggcttatttatctgtggtatgctgcaatgaatgagcttatgagcactatgctagtaatgtgtaaattgagaaatggtaatgcatggatttcatcaagtgttcaaagcgtaggtgacttttcactagtccagtactgctgtgccaactatcaactaatagtgtttgcatgtagaacttagtatgtgggtattgtttatcatctttaatttcagacatattctccattctgttcatgtttggcacagagattgcacatcttccaatcatttaatagtagtcatgcttgacgaattggttggcagtgcgtctttccatgaataaccccaagagtaccctctagtcttgtgtccactttggaccttcattgacttattgtacttgagtttatttatttttgtcttcctgtcatgttatattttccgactgagctttggagcgggtcagcactcagcaggcacattattatatggtgcttgcgctcttgtttcaaatgctttctattttatggctgtgctaatatttcaaattttcaatggtgctgcaagaatttgatttcacattgtttttagcatctcgtgaacacagtacttgctaactactactttagaaaagactcctgcttttttttttgtttcatggaatgatattacaaaacatcctacttggccatgtctctcttttagacttttagaaaaagtcaagctcttagaaatgttacataaataaatgtacactaatttataaatggttccttataatttgaaaaaagtttgcattaaagacaccatttaataatattcctacttcatcactgttatgagcatgggccaggccgatgcagcagtttaggcacgataaattaggaataagtcatataatggtaggagattatctagttaggaaagagatgaagtttattatctagttgggattgatttctatgatactatagactatccttggatgtcaagcctgtcctccctatatataaagggaccccatgtactctatcattaatcaatcaatgaatctctaaagttagccctaatcctcagagcctcttttagctgagcagggagaagccttgccgctgctattagtgagcgagtgccctatcactgggtcttcggacccttaccctagctactccataacagtcactacccattgcttgtacttagttccattcacgtctataatgttagatcatgctgaatctttgctccaaactcttaactctagtcaacgcacttacctatttgtaggtcattttggatgagaagatagatgaagtgcgcaagatctctagcaaagttaatgatcttgaggtgcagcttagaagggagaaagatgaatgccataggtacttaagcaatgtttccacatgacaatggcacattatcttgacagtattatccaatagttctatattgtttttctatacctttgtaggatgacctcaaagatgaagaagtttattaaagctcatgctcggtttttgaaggcacaagaagaagtgaaaaggtgctttatgttttcatcatgtttggccttgtaatgctagtacacaccagattactcctttttgcataactatcaatcaataagtgttcaccaattggagttatgcaggtcacaagctcgtttcgagaggcttggtgatttgcttgcttcagatattttgaagcgtggtgctaatgaagaggggtccagtgtcaatgaagacctaaacgaaaggagtcctaatactgcagcaactaaaaagagatcaatcccatactcaacaagtgaagaagcgaaagctggtatgtagcttagtttctcgggacactctgattgccaggttgtgatttgtacaatatggatcttggtgttatgcagcatccaactttccccttctgttaaactgatatatgtacctctttatggagtaaccagtcgatcctagtatgaagtagttcaaatgttcctttatttaatattaagcattaaaattgatgtgcttagttttcttacagtagcactgaaggatgcctagtttcttttataattggattttaattctttctgcaaattgctgaagaagtgtcttaattatgtacttaaacctaattgcttgtctcctcagtgaagaagagaagagagcgagactctgatacaatgactaggtcagataaatataggtcagatgttacagattttgataaaacaagtaaggggactgaggcaaccaagtctttatatttgaagaagaaattatgggaagatgaaaaaagtaagctaggagccaacattttcacagaaaaggtgcaccatttctcccgcccgctctcaattttatgatgaactacatatcatacttagtacactcagtccagtgctttgtttaaacattatcacatattgctagcctatgcatttgattgcactgtatatatctctactagtgtaaaagcagagttgtccttccttcccctcttcccacctaccgcgtacagcgagagagtgaaaaaccgaaaggccaaacttattacttgtctaaacaaaaagcctagttgatatttggaaagttcggtcattgccagaccttgtattgaaactgataggcttccttgatcatcaggtcctaaagcccttcttggctatgttggcatctgtatttatctttgtttgattgtgcttatcacaggcaaatattttgttaacttgcaggtcaaaggttctcccgtcagacatgttttgccctccactggcatggctgctcatgctattgatgatctcaacgaagctattgaactggaggacagacatgaatccatagacgcattactagaaaatgatgctgatgacaaaactagatcacctgctattcccctgcagccaccaccagtggtacagaatgcttatgagcaggtgattaaattttcacctttccaaaaaaaaatattggacctgcttacatgcacggtcagcggcatggaactggacagtgcattttgtttataaaaaatcgttgtactaaaaaagctccttttttttccctgtgcatttgctaatttgctgaaaaagcaaactcataatttgtttcatcttttcccagtatgagggtgatgacgaggaagtcgatgtggaataagtggatggcctcgtttctagacaagaggcctctgatgaagcaatggcgagattagcatcttccccagctccttataattagtactattagcatcttggtgtacaaagtgctatctatttgacattgggaattcagcttatatttatcaagaatccttttgtagtaacatccttggcgctgagacagccttagtcaactatgtggagcagccgtataaatactccatagagtgtctggtttggctaagctaatgacgtatggtatgtgcgctccttctgccctggggattgcgacgccagatgtgtctaccttctttatcgctgcattcagttaagaagaagaaatgccaaagatgaacatttcatggtcatctggctagtcgagctgagcgtgtaaactgggtaaagcaagatatcctgaattgaattcctgatgcctttgtacagcctccccaagacccgaaaaagctagggtttgctgctggcctggtgctgcggagcgggcatgagcgccagctttctccctcgctgttaagggtgtaataaggggttaatttgtgaacccgcttataaatcaaaatcttctcatggctggtcgtcctcgctctcctgtcgtcggcttctcctccatcgccgatgatcatcactctatcatcagctctatcgtcaattcgtctcctgtgtttcggcctggccagattaacctaagcagaaagagcagtagttttatcagttggttatattgacccaagccagaaatagcagtagttttatcggttggttttataagtcgtaacaatatgtatctcacgacttaaaaaaataatatataaaaatatcatgttggaaatatcctaaaattaactttataatttaaaatcgactcaaatatctaaattttaagtttatcatacccgggaggttatcctcgtcgagagaaaccgacccggttgattttcctgtgtctatatatatcgaccgagttgaagcctcaagaggaggaaaggatcgaccccgacccgacccgaagtcccgaccccaaccagagagaggcgcgcgcgtgcgggtgcggtgcggtgcggatcggatcggattgggccgagtccccgaccccacaccacacaccccctcctctccccgtccgcgagggctccggcctctcctccctcccgcgatccccttcccctccgcctctcgccgccgcgccgcgcctcgccgcgcctccagccatcgccgtcgaccgcgcgcgcgcgcgagaggttcgtctccgtcctcctccatcccatctctctccccttccatggatatttccttcctcttctctcgggtttcttctcttctacttgatgagattttgtatgcatgtatgtatgtgtgtgcgtggggggattggattgattggatttggagcgcgccttagaaattcgaggggtttcctgcgctctgtttgctttgctccctagatttgccactccgatttcaaactcttcgagtaccaaccaacccttgcggtatttttgctcttcgaatgaggttatgagatctcatgagccacttagttttcagacatgcagatgcgcgcatgtcgcctccatgttgccggcgtaccatctgttttttttttcttctgttatttttttcgtttcataagattaccatgtgctagtaattactgtgagtgattttatcagagacccactaattttttatgccttaatttgttttctctcattttttgcagagcggctgtacgcgattcacatgtgcggtaatttacctgcctactgccgccaaccagaagtggaatataccctatcctaattttctttcttcggatgaaaggtctgccagtctgcgtcagctatggcacagagttcgtcccggcttcaccgcctgctcacattgctagacagtatcctttctgcaagactatggttcgctatgcttgcagttttacagatgatcacacgctatgctaggttatactctgtaccgattctctgataaactaagcaaattgcctcatgaaatgtgcaaattagctgggctaaaacgtacagtctatgcttttgcagtcgaacatatatcatttgatatcccctttggtttatctatctattgtgcaaagtttcctttaacacaactagctggttccacgcaagcgacaaggttcgctgctgcacggcaaattggagaaattgccaagtcccacccccaggagctaaatgtcttactcaaaaaggtataccaacaattccaccacctgctagttttgtggatccttctacctgaaaatgtttgcttaatataatatgtgtaagctatgatgtgtgatgtgcgaaatgcccaacttttagtttcttcaattcatgcttcgcttgcttggtagcacaaaaatgaaccctgcagttttatgttatgctgaattttcagtggtgttgaagttatagattttccttttctcggacatgcaggatatctgcattatcattatattaagaaggaaaagggtaaaagaaccctgattacaaaacacccacacaccccagctctcaggctacatgcctgtccgtgctaacaaggaccacacgcagaaaagaaaacagcgaccaaaactgcccctcttcaacctgaaactaaacacgaggctgtagacagttaagaaggatagccctctagcctcagccaaacaccaaaaccgcccctcctcttcagcaagcaggatggcactagccaagtttggagcagcactattgagggcacatcggtttcgatgcttccaaagcgtccaagcaccaagaatgactagagaattaaggccctgttgcactggaccgttggttgcctcgttggtcctgttccaccaaaataccctgaccaaagcgctgtcggagtgagaaccaaaatttcctcgcgaagacacaactagtgagtagatagatgattatttcatcagcttggtcgcaatgagggcgttgaagttatagattaaatatcaaactttgagggatatatgattttgtgtgatgtctgttgtaagatgcaatgccctcccatgcattgattgatggatgtttgttctatgagaagtaactattactgccttcattatctattatatcaaggtagtaacatgctcatccactggagaacaagcttgttttctttttacacatgttctgcggagaatggctggctgatatttatgcttttatgttatggttttaggtttctccatatttacgtagtaagaattgggacacaagggtcgcagcagcccatgcgattggtgccatagcagagaacgtcaaacacacatcggtgaaagacttgttcgcatctgcagaagcagaaaaacatgcttctgggttgtctggaattggtgatgttgggtcaacgttgcggcatgctgatactactgcaacatctgagcttgcttttggaaggtttgttgagaattctttgaaactttcctagtgcttagtagaccttcccgctcttcttttttgcctaattggaaatggacaaactaattccgtttaacttctttttacagcttcgatataaacagggtgttggaatttggatctcctttattggcatcaggtggacaggtgtattttcttcttaccattattttgccttgtcatatttaatgaatacaattaaaatactgtggtttttttttcagggcaatgttattttcagattcaatccatttttttcttttctgatagtgtcatgcatccatctattgtttgtttttctttgccatatgtcaacttcttgagggctttctatttttcttactaggaacatagtgaatcgaaagcacttgacacttagaagtaaaatagatcaagcctcttccattgcactgaattttcgtttttgacataaaactgcattgaatattgtaatgtataggttacttactttgctgctaactcgaggaaaagaattttagtggataatgtttaaatctaggaacatattctgaagctcctcaatataattatttctcaaattctggagatacacacaaaataacctcgaatttctttgtctataccaagatttttttaaaatttttgttttaaggtgtacttggcaattccattccatttcttatttgtttatggtttcatggtatgcaacatgtgaaagctaatggggattattgcttttgtgcttgctactaggaatatgacattgcaaatgataacggcaaaaatccagcagagcgtttagctcgccaaaagcaaaatctccggcgtcgtttaggttatacttctctcttacatcttattgttgctactttttaattttcactttatggcactcaccgcaccactgccacaaggttctttctatagtgaagactgcacctgtattctgcaaagtatcgttgtactctgatatatctttgaactttttgttgttgtgttggatttctcattcctttcatgtttctgttctagtgcaggtctggatgtatgtgagcagttcatggatttcaatgatgttatcaaagacgaggaccttcttgcccaaaagaattattggggtgcaaatatgcaaaacaatggattctattcatttaatactggtcagaatattcagcacttggttgcatctatggttcccaggtatcccaaacattccaattttcgctccaggcgattaagcgccagggagctcaatatgctgaagcgtaaagcaaaaagcaatgcaaaagatcatacaaaggctgtacccgaggatgatgacgttgtgccaaaaagttctggaccgtctaacggggcctcttctgatcaagttggttcacacaacacatgttctgtcaattgtactatatttttctaagattttagtatcctcccgcacaattttttatttttctggggtcatttatgagatggtcattaattccacattcttaaattatcgggagccttggtagaggttgtaaaactttgtttctgattgttctcaattgctagcacaaactatcatgtctgaatatgtggcgcagtgcaagtaagttaagtgcatttgtgggtgtgtgttcttccatgcatcatgcatgtgtggtttgttgacttgttattgttggcattcctgtttggcaatttacgcagttgcactggagcattctgttgggatggctttgtcttcaatctgtgatgatctaatcaccccacttacattttttcaggatacagttgatgcaatcacagatgaggacaatctggagtacagtgagaatgggagatggccttttcaacagtttgtagatcaacttattcatgacatgtttgaccctagtaagttcattatctgtcttgtctctgaaatttgtcccattcttatctcgcttacaatctttttactgagtgttgtattgtagtttgggaagttcgccatggcaccattatggctttgagggaaattttgacgcatcaaggtgcttgtgctggagtatattttcctgatctgaactcacctttcgctgaccttgatgataaaaacaatttggactccctgaaaagagcacatggtattgatcttaatgaagacattgattcgggacagctcgagccagttttgaaaagacaaaagaaagaggagtctaatccagaggttatggacattcagttggataaggagccaagtaacggtgattattccaaaacagaggcaagtctgagtactgagcctactgtatctagtggtgaaccaaatcttgctcatgcaaaggttgaatcacccttccaggttgatggttcagctaacccatctaaggtggatccatattgtacaccacctcacgaaacactcaactccatgcccaaactgagttctacccatctccctgaaaattcaaaatttataaagctgatgaaactagcgaactactcagcggtaaaaaattgggaatttcttcaagactgtgcaattcgtttcctttgtgtactttcattggaccggtatgtatctctggacttatatactttttgtgtgtatttggttgtcttggctattagtcttattatttttttttgcctttgttcttcctgtagctttggtgattatgtatctgatcaagtggttgctcctgttcgtgaaacttgtgctcaagctcttggtgcagttctgaagtacatgcatccgactctagtatgccatacactgaatattttgctgcaaatgcaggtgtgtcctgtagtaattatttgtcttgctgttgtcaacttcaaaacagtacattctctgttgtcatcatcatcaccatttccgtccttttctttgttctttcagcgcaggcaggagtgggaagttcgtcatgggagtctccttggaattaagtatttagttgctgttcgtcaggtgattgctaatgagaaaaactataacctaataggctaattcaatcgtctttgtgcatatatgaccagaggggcagtagtagttggcttgctaccaagtcaagttttgcttttcatatctctacactagaggaacttaggagttctgagaaacatcctcttctgtttactaatatttgtttttgacgcctaatttatgtgtaaaattgctataatattgtttccttccccaccaggaaatgcttaaagacttgcttaattatgttcttcatgcctgtaaagctggtctggaggatccagatgatgatgtccgggctgtggctgcagaggctctgatcccagctgctgcttctttagttagactaaatgatcaaatgctacattcaattgtgatgttgctttgggatatattgcttgaccttgatgatctaagcccttctacaagcaggtatgttcaatcatgctttcctcatttagtaaacacattgtttgcgtaatgttgaacactgagcccatgttatacattatatggtccatctacttccgatttctaatcttattttgaatccagtcacctgttcccagataaggaatttaaaatgttggatagttgttcgttgctcttttattccgtttaaagttgactgtactcatgccacaataaatattctgtatttctcatgtccaaatttcatttttgtttcagtgtgatgaatttgttagctgagatatattctcaaccagagatggttccaaagatgcttggcacaacagccataggtggagacaacgaatttgatctaaacagtgtaactctggttgccggtgaagaaaaaatgggttctaatgataatccttatgtcttagccgctctgacaccccgattgtggccttttatgagacatagtattacatcagtccggcgttctgctgtacgaacattggtaagaattacatggaatttgagatccactgtagtttgattgtgctgcagtatcaggtgcccattcgagttgagtatgagttatataaatgagaaacagaattgtaatgaaaaatatctgcaataatttaccgggtgaaatagcagttttgagccatcttgtgtatgttttctacattgttttgccaagaaaaaccaacctatccttgggattttgccaatctggagttggatattccactctgttcccatgtgcaattggtttttgctgtaagcttctgaatgccatttgttatgctttcctagttaaaaaccgtgaagttcaaactttttgtaggagaggcttctcgaggttgggaacaccaggaattcagctaaactatggcttgcatctatattaggtgatgcgctgcaagttgtcttccagaatcttcttttggagtcaaatgatgagattattcgatcttctgaaagggcttggaaacttttacttcaggttactgatgttctggctttccgggtgttgtgaatttactcaattcatagaaatttaatgatcatgtctattacaggattatagtaacaaacaaaaatatttctatgcttgtagtgccctacggaggaccttgagtctgctgcaagttcatattttagtaattgggtgcaacttgccactactccatatggcacagcattggattctgcaaaaatgtttttgccagttgcacttccacgaggaagtcgttcaagagctgctgcaaagatcaaatctgcaaggttagaacatgaaaatacgagaatgatatcttttggttctaccggagagaacacttcacaggaaaagcattctgaagcttccttgagtgtttcaaaaataattgtggggtctgattcggacaaatctgttactcatacgcgagtgctgacgtcaatggcccttggtctgtttgcctctaagttgccagaggggtcgtggcaagttgttcttggtccactagcaagcgatctcatgtctctctcaggagtccagagacaggtaagaaaaaaccttatgttttagtgcataaaagcattcaattcaactacttgttttgcactcataattttctatcgctccaggtggcttctatggttattgtttcttggtttaaagacctcagaaaaagtgatcctgctgcggtgggtacattgctagctttcttatcctccctgaaagggtggatgttggacttactggcttgctctgacccttcatttcctacaaaagattctccgcttccatatgctgagcttgcaagaacatacaggaagatgcgcaatgaagccaataatttgttccagtcaatagaatcttgtgctcttcttaaagagtatacaagcaacttaaactttgaagctgacatgctgagtgttgatgatgctattaacttcacttcaaagcttttgttaccatctgaacctgattttagtttggacagtgataaaattgtcttgaacaatatagagtcagcaaaacaaggtctattgtctacgtcaggctacttgaaatgtgttcaggtatgtgaaatttctaattagggtgtcttcagatttatattaatgtgttagaattacttgttgcatctgtctagttctgattttttttatcctttttattagcaatatcataaaataggtttccttgtttgatgatgttctgcagaataatttgcatgtgacagtttcctctttagtggcctctgctgtagtctggatggcagggctgcctagtaagttgaacccagtcattttgcctttaatggctgctgtaaaaagggaacaggtacgacatagtattcttatgctcttaaattttgtcttagatgtaagctcaaatggttccatatcatttaggaggaaatacttcaggacaaagctgcagatgcacttgctgagctcatttttagttgtgttggccgcaaacctggcccaaacgacaaactaacaaagaacctctgcacgttaacatgcactgatgcaagtgagacacctcaagctgcagttataaactcaattcaggttattgaggaccaaaacttgctgtcgattggtaagcgttttagcaatcacaaatccaggggccagatgacttccggtggtgaatcgaagtcggagggttttataagccggcgtggatcggagttggcttttaagcatctttgtgagaaatttggagcatccttatttgaaaagcttcccaagttatgggattgccttacggagtttcttaaacccgtcaagactggagatgatcttatgaaagaagatccaagtattgcgcagttaggaagatcttgtgaggacaaggaaccgcagtcccttataaataatatccaggtttgttttataaattaatttgaattcaattggttcccttttgttttggcataaaactgctacatgatgttggattagaccatcatgtcatatcaatatgaatcaatatatctttggttacttgctactatttagtataaactggtttggttccattttcatctcttgccatatttctaatgccatttctgctcctcctcacaggttgttcgttcggttacacctcatttggctgagcccttgaggcctcaattgctaagtctccttccctgtattcttggttgtgtgcgccatcctcatgtcgctgtcaggttagctgctgcaaggtgcatcacatcaatggcaaaatcattgactgctaatgtaatggtaattgtgatagaaaatgtcataccgatgttgtcagattcatcttctgtctgtgcaaggcaaggagctgggatgcttttgagccttcttgttcagggtttggctgtggagttggttccttatgctcctttccttgttgttcctcttctaaggtgtatgagtgatcctgatggttctgttagacagactgtaactcacagttttgctgctctggttcctttgttgccattagcaaaaggttctttgttaccggatggactgagtgaacgcttatctagcagtgcagaagatgcgcagtttctagagcagctcctcgacaactcccaaattgatgattacaagctcagcattgatctcagtgttgaactgcgaaggtctgtaactatcttaaaagctcctttattggaatgtggcttgacgacgttattctacttagtttgagatagtgtattgagtgctattgtggataccatacataataatacttgttataatgattattatttgatgttcttttaacaaaatgttgtggatcgctacaggtaccagcaagaaggaattaactggctagcattccttagacggttcaagttacatggaattttatgtgatgacatgggtcttggcaaaacactccaggcgtctgctattgtagcagctgatattgctgagtcacgtgcacggaatgatgagcaagatccgaaatctttgattatctgcccttctacattagtagcacactgggaatatgaaatagagaagtacatagacagctctatcatgaaacctcttcagtacatcggttcatcacaagataggattatcctccgttctcagtttgataagttcaacgtaatcataacgtcatatgatattatacgcaaggatattgattttcttgagaatgtcttttggaactattgtgtgctggatgaggggcacataataaagaactcaagatctaaaataacatctgctgtgaaacaattgaaagcacaacaccgtcttatcctcagcggtactccaattcaggtaaaatttcattcatgaatcttgttggtatgcttttcgtctagctgttgcggttcgctttacattgcactttttatttcattgttcatgttctttgtagataattccatcgatccagtactgaaattggtattactatttatttgacacattccactataattgcagaataatgtattggagctctggtctctatttgactttcttatgcctggatttcttgggacagaaaaacaggtaaatgtgctatgaattcaactttacttacagaactgaaagctaagaatttggtcgttgacatgaaccatgccttttttgttcaagaacttagtttagtttttaacatgttcctgatttactcttacgctagcttccaagcttattagttagttcaggaataatatatggatctatggacttgctagttagttccaagcttattattagttagtttagtttttttgttattcactgtggacttgctcagagcgacaggtgatatatggatctgccttatctgggccgttacactttcttacatatgatgcttgcaaatgatatctatgtttagttgtgttataggtgctaggctgcttgataaatcattagtagtttgatgacatgcatctgtagaaaaagacattggtgactatattgtattaatgtaagtggacatatatggctgtgttcggatgagggggttcccaaccccctctccctcgcattccgtgcgcacgcttttcaaactactaaacggtgtgttttttgcgaaaagtttatatacgaaagttgtttaaaaaaaatcaaattgatccatttttgaaaaaaaatagctaatacttaattaatcacgtgctaatggactgctctgttttccgtgcggggagatgggttcccaaccccacattacaaacacacccatagaatgttttaaccaaccaaagatgaaattgtttctgctttcatgaaggggtggatttttactagtcctgactcttgataattaccttggtctattctgatatgaagtatttgtgctgaaattaaatacaatgttaattatgcagttccaagctacatatggaaaaccattgctagcagcaaaagatccaaaatgttcagcaaaggatgctgaagctggcattcttgctatggaggcactgcataaacaggtttttatcttctgtagtagacttgaagtctttaaaaataactgggggttttgagtcttgtgacctttgttgacaagtaaaagtcattttgctatactaggtcatgccgtttctacttagaagaacaaaggatgaagttttatctgatcttcctgagaagattatccaggatagatattgcaatctcagtctattgcagctcaaactttatgacaaattctccaactccaatgccaaacaagagatttccactatagtaaaagaaaatgaattagatcaatccacttctcaaccaaaggcaactcgtcatgtgtttcaggtactgcagttagacaaacattttagctttctcattctgcatttcttatgtggtatcgtgtttgcgttttaattgaatatgcttttgtaatgcaggcactgcaatatctattaaaactttgtagccatcctttacttgtaactggggaaagcccacctgattatcttgtggaccttctaaaggaaatcggtatgggaactggtgatgagcttcatgacctacaccattcccctaaacttgttgctctccaagagatacttcaggagtgtggtatagggtcagaaatatcaagccctgatgcttctgcagctattgggcaacacagagttttgatttttgctcaacacaaggtactgagtctgttctcttattgagactatgtatccctgtttcttttggtatattttcatccttgtcatgtttataaacattcttttctccaggctttgcttgacattattgagaaggacctgtttcaatcccatatgagaaggtgagttttatatattgtgatgtacatcagcttcatgaagaattcatcatgccagtgtgttgtctgtgttgcaacagatttgaaaaaaatatatcatgagttctaaactgaaaaattatatatatatatttatatattttgaaaaatcatataatattcaatcaaacatcaatcaacaaaaaactcaatccatatgcacaaaagacatttatccggtcctagaagatacggtgagatcgcagtttcaccaccaccaccagtagcagattcttttatatagtagagattaatattagctgatgcaaattattttaagcatcttgctttatgttgttttatcttgtgttttattatgcttggatatttgtactttctagagtactgcagtgctgttttatctttgagtaactgtaaatataaggttgtcgttggcctagttgataactgactaaaaatacacacttctgtttctcagtttcctgcctgtgctcatctaatcagcaaacttttgatattcattcagcgttacatatttacggttggacggctctgttgaaccagagaagcgatttgaaattgtgaaggcattcaactcagatccaaccattgatgtgctcctattaacaactcatggtaggtttggagaatgccatatggatcagggatttactcctagatatatatactagaaaagctatatctgattctttcctgttgcagtcggtgggcttggattgaatttgacatctgctgacacattggtctttatggaacatgattggaacccaatgaaggatcttcaggtttgcttttgcatattttatcaacgataaggctaccattaaatttcctccaccattttcaagctatcctctgtgaaacaaacgaacaatactcccctcttacaggcaatggacagagcacaccgtctgggtcaaaggaaagtggtaaacgtgcaccgtctcatcatgcgcggtaccctggaagagaaggtgatgagtcttcaaaggttcaaggtgtcggtggccaatgcggtcatcaatgctgagaacgccagcctgaagacaatgaacactgaccaactgcttgatctgtttgcttcgacgcctgcttccagaaaagtaaatcccttgtgaccatatatctcgtatagaaaaaacttttgtaatttttattctttatttgggtttatgatcctttgtctatggccatacgcaggcgtctgtactcccaagcagttcgggtggtgatcagagtaaagattccaaggggaaatctggtgggaagggtttgaagtccattctgaatggtctggacgagctatgggatcagtctcagtatgcagacgagtacgatctcaaccagttcttggcgaagctcaacggctgaacacacgatcaccggtcctgtacagtgtaaagcgaattggggcgtgtgatgaacaggttggcagattttgttggcaaccacaggagtcagaaatttttttgttgtttcatacggaagaagggaaaaaaaaaggaagatcgcaagatctagagcaatgtggctaacatataggtgcttgagatggtgatctcaaatttttgtcttttgagcttttggttaggagggtttagagagagatagagctagtcttgagaggagttgtatatactatctgctcattataataattaatcaaaggctgcagctccttgtaaattttgccttgagttgcttactgtttctaccttttacttggcctagtaactgagctatccagtggtgtagtaagcctgcctactgggaacgcggatcatttttgtctcgctaacatgtgaaagtaatagtaagatcgggtaaaaacggaaaaggggtgatacattcttgcctatcaatccttgctcgtctgaatcccgttttggccgctaaggaagttcccaaaaatttttcctgttcattgtctgaatcccgttttggccgctaaggccgttttggacaaatgtatagagcacaaaatatatattaaaaaaactaattgtacagttatggagaaatcgtgagcttaatcagttcatgattagccataagtaatacagtaacccacatatactaatgacgggttaattacttaatttggctcaaaagattcgtctcgcggtttccaagcgagtcatgaaattatttttttcattcgtgtccgaaaaccccttccaatatttagtcaaacatctgatgtgatacctaatttttttttcgtgaactaaacggtccctaaaaggaagtcatctcagccaatgtgaaactgatgacctttcattcccttctattctttcatcgttgtaattgtgacatgttagactataactttcatcagttagaaattgatcccttggtctccctttattattattttttgttcgacccttgcttaggccatgtttagtttcaaaggttttcttcaaacttttaacttttccatcacatcagaactttcctacacacataaactttcaacttttccattacatcgttccaatttcaaccaaacttctaattttgatgtgaactaaacacaaccttagatgcatatcttttcaatgtcctttgtttctacatagcctacatagtaagggtagaagcggtgtggaaattttctaaccataccgatacagtttccctaaaatattacatagtcatgctgtagcagcactcggaatatatatgatctagttagactagttcttctctcaactttctcagtctcccctttatttttcacacgcacgtttcccaaactactaaacgatatgattatttttttttgaaaattttctataggaaatttgatttaaaaatcatattaatccatttttatttttaaacttaatacttaattaatcaagggggtcaatccactgtttcatttttcgcatagggaggagttcccaactactccctccgtccctaaatatttgacgccgttgattttttttaatatgtttgacggtttgtcttgtcaaaaaatttaagtaattattaattcttttcctatcatttgattcattgttaaatatactactattactcaagtttttgaataatattcacaaaagtttttgaataagacaaacggtcaaacatgtttaaaaaagtcaacggcatcaaatatttaggaactaaaagagtactacaaacgaacgaagcctaggcttctccatataaggctgtgtttagttcacagcaaaattaaaagtttggttaaaattgaaacgatatgacggaaaagttggaagtttgtgtgtgtaggaaagttttgatgtgatgaaaaagttggaagtttgaagaaaaactttggaactaaaccaggcctaaatgaacattcgatggctcctctagaaacattcttgatcttagcattcagtttggaagatgaaatggcattcacacgagcattgcagattttcatggtccatctggctagcagagaccagagcgtcgtctgcaaatgcatgatctgagcaaacctttgcagtctttgctgcgttgcgttgacggtcagtcaacccacacacacacgcatcatgcaacacattgacagattggccttaacttcactcggtaatttatttcatcgctgtaactatggcatgttagactacaactttcatccgttagagcaggtacaatagcaggctgtaaacatattttaataagataaaagatgagagagaatagcagtgggctatagatctatagccagctgcagcgtggactccaagacacaatgtgtgtatgacaggtggtaccatatattaatagtatagtaaacaactatcgtataaattacctattatattggctataaataaattaaagttagtagtgggttatactattaaacttgctcttagaaattgatcccctggcctccctttatattagttgcattcctttgaatgttccacacttgtttagcgaattaaatttaaaaatatactgttaatttatttttttttctcgaaattttcaggatatatttttttaacagaaatatatcgtcgttctgtcacaaacattacacgaacatgacgacgcgggcgagacggcgctacctcacacgatgaaatagctagaccgagcagtaccagcgagcgagaccgaatggctggccgattcaaactgtttaattatctgatattaattaatcgctaattagaatgattaatcacttgttattattaattaattgctaattgggtaagtctctaattatgcggcagctcactgggcaagccgttcgctctctgctcattcattgtgcgagattgcttggtctcgttgtttcgtcacgtgagaccgcgcgatacgctatggttgcgcacagtcaccgtgcaagaccgtccgcgtcatcacacctcacgttgtttgagatcgacagtttatttctattaaaaaaataaatcaacagtatatttttaaatcaaatctaattacttgtttagctgtatatcttttcaaaatcgattatccctacatagcatatgtagtaggggtaaaaacggtgtcgaaattttccaaccgtaccaataccatttctaagaaatattacatggggtgtgttatgttgggcttttcaacctgcttttacttttgcttttgcaaaagttaaaagccaactaaagggctcaaaaatcataagtacttttgctccaaagctgcttttagtgcagtacaaatctaaaagcacccctacccctgctttcattggcttttgagtaaaaaaaaattacccgcctctctcattataaagaaaacggttcgacaaaaataaaaattaattacacagattacgtgtaaattacaagacgaatcttttaagcttaattgcttcatgatttgacaatgtggtgctacagtaaacatttgctaatgatggattaattaggcttgataaattcgtctcgtagtttacatgcggattctgtaatttgtttggttattaaactatatttaatactttaaatgtgtatatgtatatttgatgtgacacagtaaaaaactttacccataaatctaaacacagtcttaatattctacgcgtgtcacagtgtgaaattttttgttatgaactaaacagtttggaagatgaaatggcattcgcacgagcgttgcagattttcatggtacatctggctagcagagaccagagcgtggtctgtaagccagacagcccatatgcatgatctgagcaaaccttgcagtcgttgctgcgttgcgttgacggtcagtcaacccacagacacacgcatcatgcaacgccattgtcagattggccttaacttcactcggtaaggcctggtttaggccatgtttagttccaaaaactttttttcaaaaacatcacatcgaatctttggacatatgtataataaaaaactaattgcacagttatggaggaaatcacgagacaaattttatgagcctaattagtccatgattagccataaatgctataataactcacatgtgctaatgatggattaattaggctcaaaagattcgtcatgcggtttccaggcgagttatgaaattagttttttcattcgtgtcccaaaaccccttccaacatctggtcaaacgtccgatgtgacaccaaaaaattttcttttcgcgaactaaacatacccttaagtttcccaaatttttttccaaaaaacatcacatcgaatctttggacacatgcatgaaacattaaatatagattaagaaaaactaattgcacagttagaggaaaatcgcgagacgaatcttttgagcttaattagttcataattagccataagtgctacagtaactcacatatgctaatgacagattaattaggctcaaaagatttgtctcgcggttttcaggctagttatgaaattcgttttttcattcgcgtccgaaaaccccttcccacatccgattaaatattcgatgtgatacccaaaaattttcttttcgcgaactaaacaggccctaactcgactcattcactcgcgaactaaataggccctaacttgactcattaaggctgtgtttagatccaaagtttagatccaaacttcagttcttttccatcacatcaacatgtcatacacacacaacttttcagtcacatcatcttcaatttcaaccaaaatccaaactttgccctgaactaaacacagcctcactcactctagtcccagtcaatctaggtggctagctgacagcaaaaaattttcgccatgtcacatcgaacgtttgaacatctgcatgaagtattaaatataggttaaaaaatcacatattgcgactaatttgtgagacgaatcttttaagcctaattgctccatgatttgataacgtggtgctacagtagacatttgctaatgatggattaattaggcttaataaattcgtctatctgtttactgacggattctgtaatttgtttacctgaatacctcatatgacaccccgccaaaactttaccccctcgatctaaacacccctgaatttgctatactagtatataatattctccagccggatccttcctctcggacgcagcaatggcaatgacgatgctcttcagtctgctgttttgcacagctaaggctactgatgattcaggagcagaaactgaagcagaagcactcctccgatggaagtccactttgatcgacgccaccaactcgttgtcgtcatggtcgattgccaactccacctgctcttggttcggtgtcacctgtgacgccgccggccatgtcactgagctcgaccttcttggtgccgacatcaatggtacgcttgacgctctctactctgctgcattcgaaaacctcaccaccatcgacctcagccacaataatcttgatggtgccattccagcaaatatttgtatgttgcgcaccctcaccattctggatttgagcagcaactatcttgttggtgttatcccgataaatatttccatgttgattgctctcaccgttctagatttgagcggcaataatcttgctggtgccatcccggcaaatatttccatgttgcacaccctcaccattctggatttgagcagcaactatcttgttggtgttatcccgataaatatttccatgttgattgctctcaccgttctagatttgagcggcaataatcttgctggtgccatcccggcaaatatttccatgttgcacaccctcacctttctggatttgagcagcaacaatcttactggtgcaattccctaccaactcagcaagctccctaggctcgcccacttaggtcttggagataaccacttgacaaatccagaatatgccatgttcttcacacccatgccttttttggaattcctatctctatcgagaccttttacagtgtttacattcctaaaatggcatagatctaacggttcacgatgaaaggtaccttatgaaaggtatcagaggtagaaaggtactaagtattaaaaggtaattgataacagggcaattatgtctaacaacgtatggacgtaccgaaaggtacggtgtaagtggatttgaaggtaccacaaggtaccacgtaagtagtttttaaaggtaacgtaaaatatgatttatgtggtggggacaaaaattacattctcttctattcggtttccaatcttcggtcgttctgtttgcgtcggtttccaaactttggtccgatttacgtggtacatatcatattcgcatgatcttgataattatttccagatagtcattaatttacatagcaatttggtgatccatcgtttgatgaatgtaatcaaagatcgaaaggacaacaaattgagaagatttacgcacctaacaagaacaaaacaagttcaatgaggaagatttgcgaaaaaaaactaaacaaatcgtctgacagatcgggaccgtgcggccgcttctagctccggcgaacataggcagtcctggaccacttcctccgggtcctcttcctccaccgcccctccctccaaccaccgcctccggccacacgtccaccgccggccctcaattctcctcctttcaacttatcgaagaacacgtaaaccttacgtacgaacagaacgtatctaagaatgatgcaacgcaacatgctacaagctaattccttcgataccttctcatacctttttatatgtgtaaaagacacatttgtcattctaatatcatcatatttacattaatgccacctattacaatattttctttccataccttgcccctcgcagatcaacggctcacgtcgccccacctcctttacctcgcaaacatcgtaaaatccctcatctctatcttacaattatctcaacggtacttttccagaattcatcctcaatagcaatagtttgaggatggagcacctcgatttatcgtataatgccttctcatggtccataccagattcactaccaaatttgagggttctagaactgtcgaacaatggattccatgggaccataccacattcactctcaagactacaaaagctccaagacctatatctgtacagaaacaacctcaccggaggaatcccagaggagcttgggaacctaaccaatcttgaggccctgtacctgtccagaaaccggttagttggaagtttgcctccctcttttgccaggatgcaacaattatcattttttgcgatagacagtaactacatcaatggtagtatcccgttggagatattttcaaattgtacttggctcaactggtttgatgtttccaacaacatgttaactggaagcatcccaccactaatcagcaactggacaaatctacactacttggccctctttaacaacacatttaccggtgcaatcccatgggagataggaaacttagcacaagtatatttagaggtggacatgtcacaaaatctatttactggaaagataccattaaatatctgcaatgcaactttggaataccttgcgatcagtgacaaccatctagaaggcgagctccctggatgcctgtggggtttgaaaggtctcgtttacatggatttgtcaagaaacactttttctgggaaaattgcaccctcagacactcctaacaatgattccgacctactcgccctggacctgtcaaacaataacttttcgggttatttcccagtcgtactgaggaatctcagcagactagaatttttgaatcttggatataataggatttctggtgagattccttcgtggataggggaaagtttttctcatctgatgattctacagctaaggtcaaacatgttccatggaagtattccttggcagctatcacaactccccaaactacaattgcttgatctagctgaaaataattttacaggctccataccaggtagtttcgccaacttatcatgtttgcactcagaaactagatgtgtgtgtagcttaattggagtatacctcgatctagatagtagacactacattgatattgattggaagggaagggagcatccatttaaagacataagtctacttgcaacaggtattgatttatcaaacaattctctctctggtgagatcccttcagaattgacaaatcttagaggtattcagtccttaaatatttctagaaattttctacaaggaaatatcccaaatggaattggcaatctaacacatttagagtctcttgacctctcttggaataaactctcaggccatattcctcatagcatatcaaacttaatgagtctcgaatggcttaatctctcgaacaaccttctatcgggagagatacctacaggtaatcaactcagaacacttgatgacccatcgatttatgccaacaacctggggctttgtggatttcctttgaaaatttcatgctcaaaccattcaagttctacgactacactagaaggggcaaaagaacaccaccaagaactggaaactctatggctgtactgctcagtaactgcaggagctgtctttggtgtttggctgtggtttggagcactgtttttctgtaatgcctggaggcttgctttcttctgtcgcatcgatgccatgcagcagaaacttatgtaaaacatagctcatctgagtaatatgctctgcttctcattgagtccacctgagcgtgtgtattagtgtcacattatgtcagcactgcactaagatctaaggttcagtaggtattatccctttatttcagccatcgatgagatgtaatttgctgttgccagatttagcttgttgttgttgtcatgatgaactcttgttataagcttttagtgtaagtcgggtagcatccttggtcagaaaagaaaatttacatgttttgatgatgagaccaatttcctacatggttgtgtttgaagatgcaagtagcatgtaatcaaggaagttccaaataaagtagaatacatcatggctgtcttttgatgtatttgcaagctttgttattacctttggatgcatacagacttcatttgacgctaatttggagaattttgtcttattttctgttcatactgtaagctgtatgtattctgttttttttttctcatcagctataaattactgcagtacacttctaagcaaaagaacacagctttgccggttgcagcaacaatactgaacacaacaagaacacgcgtggcaaaatttctattactagaatttcaccaaattccgacaaaaaaggtggagaaatcataagaacaaaatcacgctatccactgaaaatttccaggaagaattgcaaatcaactccccttgtgatcagtggccgctgttcacgacagcgcagttcctcctgatctccccctccgatccggtcttgacctgcaccgcgcccagcgtcgccatcgaccggccgaacacctggaagaacacctccggcgggctcgccacgacgccggcgatgtccgcccgccccgccacgtcggtggcgagcgcggcgttggaccggagcaggccgcggtgttagagtatatgatagttaaagttatattaggatatgattggtttgtttggattccttccatatctataatacttccttatttcttcctcctatatatattggatcccctgagactcaatacaatatgtcccacgttacgcagtatacctctcctatactatacaacatagtatcagagcgggtgatctaaggccaatgccgctcacgcttccgctcgtcccccccggagggtttcgatctcccgggggcggccacccgtttcctttttttttcgctcgtcgagtcttcgcggcctgcctccccagaggagtcaatctccgggctgcggccgcggcctgtccgtcgtcatcttcgcgtcagcaggccctccgtcaccgtcccccgcgccctcagattcgtctacaccgccagcgtgtacgtcgccgggtcacccctccaccggcgcgctgctcccaacggcgccacccccgtgccggtggctcccgacgccaccagcctcctcgactccgccgcgaccacgtggtgaccaccgcgccaacggccgacctcagctccgccctgccggcatctggaggacgccagcagggccctgcgcctcaccactgccggccgccaccaagctccggctgcgtcggctcccggtccctgccggtcaagcacgccgccctccccgcgccacgtctccaggaacaaccggtctcctctcattcccttccaatggtctgtctgcacgtgtcacatgtgtgggtggataagttttggggggatagctggctactggtacggctgaggcaaaaggttagctggactttggcctatgtaccggaccatcgagcaacaggggatgctaccgtactgttgctgcttgtatttttttttcgcccacaagagacaattctttttagcctctaagagacaaaaagaagagcctaacaaggaccttgagataacagcccattcatagaacgggtttgcgtcgcccaccgcctcgtcgacatctacgcgtctccgatatcggtatcgactctgcttcgactttatcgttccgcctcgcgcatcttcggcttgatcacccgttcaagcgcccggctacaacgacttctacaaccgatcggcatcaagcacgcgtctacactatcaaacttcgggttgccgctgcatcgccctcttgggctgcagtgtcgccgcccatggtccacctccactggttgttggaacactgagaggcaacacctccactgcctcgcccgcgcggtattggcaacaccggcgcgcgtgttcgtcccgagttgtccccgggtctggcaaatccggcatgacgtctcgtctttcacggttcgactacatcggctcttcggcatcatcttcctcaacgactgccgcgattgtgtcaccgtcttcgtctcccgcgcatcctcgcgcaccttggtccacgatgcccctcccgtgcgtccacgaccactctacgacggcccatgcgcgctccgcggctcggctacctcgacatctatttttcgaccacagcactcttgccggtttcttctccagtctaagtgtccgcactgctcacgcttggactgcggggggatgttagaatatatggtagttagagttatattaggataggattggtttgtttggattccttccataagtgtaatccttccttatttctttcccatgtactcctgtatatatcggccctctgaggctcaatacaatatgtcccatgttacgcagtatacctttcctatactattcaacacgtggtgcctgagcaccgtgcggtagtagccgaggtcgaacgtcaggtggctgccggggtccatctccaccacgccgtcgccggctgtcctgcacttgcgctcacgcaggttggcggcgtccagcggcggcgggtcggtgctgttgctgttggcattgccagcgccgccgccgccatagaggcggtcggcgaaggatggtgtgcgcacctgcgcgatcggatgcaatttttcagaaatcattttacatccaagaattcattgtgataatgtcacacatgtgtcctcattcttgcacaaaaacaagcttgaatttttatgatgttggcttgctgtagatcgccattttcgggacatgaatcgagcatccaaacgattgggttgaaatgcaatttttttaatgaaaaaatcaacgtaatttttcccctgttgattgtcaacaaagaatctataaaattttctcaagacatgcatgagagagtctgcagctaatttcaaattttcggttgatttgatgctctaacatatgagattatataaagctaatttttgttcagtttattataccagtcataaatcataacagtataaaattgactatagtcaccaattatagtgaccctccccaactattgaaaccagggtaatttaactcacaatacagtattgatagtggtatttactaacgtgacttctacgtggcatcccaaacatcaaataaatttaaaaactaagtagggctcgcctgtcaaccccccccctcccctcccctcccttctacccctctactaacctctgtccacctctctctccccatttcttcttcttggcctaacagcagcagggtgccgagacgacgacggggagcagcgggatgatggcgaggctctcctttctctcccaccccggtcccttctgtccaggcgctagtggaggagtggccggccgagtgagatgcggggtggcagtaggcagcgagcccgggtggtcctcatcatcctggccgggtcgcctgagttcgagttcttggatggtggggaagaacccctcctcgttccagtccctagaattcgagttcaagttctagatagtgggaaagaacactgcgagatgaccacagcatgcctgctgtcaccgtcgtgcgggtatcacggcccgattggctccgcaaagccattgcgtgggtgtcacgggagcacgaatgagccgctgtggcacgtcatcctctctcccctctccctcgtacatctccacctctttcctcatatatctccacctcttccctcactcttcttgtgggctctggcggtgtgacgaccagcaagaccatgggcagtgcctagcggaagatgaaccaaagatggcagcgaccatcgcaagtctcaacttaagagtgatgagcatgctctccctcctcccgaccacgcgccaaccatgacgctgccgccatcaccgccaccgcgccgcgccgtgctgctcgaccattatcctcctagttgtgcgtgcacccttatatctcccctcccttcccactcggggattctctctcactttcatctagtgcgtgacggagcgctggcggtacaccagtcccccagccccttctctagcgtcggtggcacactagtcccccaacctcctctttggcgccggtggctacctccggcccgggcccttgccactgctccctccctcgccactgccgatgggggggggaatggagatagatattagatagggagggggatagtgagtatgacaagtgggtgatatattttctttttaaaaaaaatattttttttaaaaaaaaatctctagtcacttacatatggaccttcaatttctactttgtgactatgctaccatatcaacacagagttgaccaagtcaacgagcaatgtcagcgaaaaccgttgagaaagtcaaattgtaccggtttaaataactagaggtccaaggtattcaagatcactaattagcgatcgatcgccccagacgatcatttttcttttcatcactttcccttttttacaccatatagtttttcttttggtaagtttatatacttaaagtttctacatctaaagtttacgcacctaaattttaaacacccaattcaaatttaaattcggatttaaatttgtagagcgaatatttataagtcaaaagtttatatagccgatttaaattcaaattcggattcaaataatttatatatagaatatttctatacataaagtttatgcgtgcaaagtttacggtataacctaaagtttatccgtttgtagagcgaatgtttataagtcaaaagtttatatacctgattcaaattcaaattcggattcaaatattatatatatagaatatttatatacataaagttttatgcgtgcaaagttttacggtataaagtctatgcacatgaatgagagtattagatgaaatttatgatgaaaggagggaagggagaggagtataaggggttgatctcccgcccatttggggctcggtattgaggttgtggagtacgattaagattggagccgtatttgagggagtcaatgtggacttattgcaagccagaaagccgacgtttccgcggagttctcaattgggcccacaacggcccatataacttggtccggaacgggattgcatggtaggagcggcccacgttgtgtgtgacgacgccgactccctcgacaggccgccgcagcgtggcttgccactacccccgcgcttcgctgtgtccgctttcccagcacagatcaaatggccgccacctccggcgagctcctcacccacgcaaccatggtgctctcgctctctccgattctccagcacaaaccgacggcgagctgccctccttatcctccgatgtcggatttaagcaaaggcgagataaggatctgccatctccttataataaatagtactattagcatccatttgatattggcaattcggctttgtgtataacatcattggtgatgtggaatggtgacgctgtcagtcagtcagtcaaagtaatcaaccgcgtggggtgcttttatctcgtgaatctttcctttccaagatgggtggtgagctgcgcaatagattagagagttgggtgcccattatcattatattgtcattataaattcatccatcctgcaaagtttttcttgacgccgagcatgtcaatgggcaaaccaatcctcactcagtctcggtctcttcgcccgggtgaccgatagtggcatgttaatgcagctttagcttccaactttcagttagaaattgatcccacggcctcccttcaattttactttttttctttttgtttaacacttgtttagcttgcatatgttttttaaatatttcgtcagtacatagtcatcctgtagcaacacccagaatatgtgtacaaagtgctacctacggagtatttgacactgggaattcaacttattatcaacaattcttatctatactaacatccttggtgatgagacagtcaagtcatcaactatgtggactgtggagtgtctttattctgtgaattttcccccagccatataaacattccatggtctggtatgtccctcatggtccatctgtctagccgagcccggagctttactgaggccgtttttagttccttttttattttttttaaagtatacagacacacatttgaattattaaacatagactaataacaaaacaaattacagattccacctataaactgcgagacgaatctattaagcctaattaatccgtcattggaaaatgtttactgtagcaccacattatcaaatcatggcgtaattatgctcaaaagattcgtctcgcaatttacatgcaaaccgtgtaattagttttttttccacatttaatgcttcatgcatatgtccaaatatttaatgtggtgaaatttttgaaagtttgaaaggaactaaacacggcctgagtcatctgtacgcctgccagcccatatgcatgatctgagcaaccttgcaggctctgctgcgttgatggtcagtcaacttcactcaacaagtcactcactccagtcccagtcaatctaggtggcttacagtatttgaatgaatttgctatactattatataggagtattctccaaccgatccttcctctcggacgcagcaatggcaatggcaatgacgatgctctttagaatctgagtctttctgctgctgttttgcacagctaaggctactgatgattcaggagcagaaactgaagcagaagcactcctccgatggaagtccactttgatcgacgccaccaactcgttgtcgtcatggtcgattgccaactccacctgctcttggttcggtgtcacctgtgacgccgccggccatgtcactgagctcgaccttcttggtgccgacatcaatggtacgcttgacgctctctactctgctgcattcgaaaacctcaccaccatcgacctcagccacaataatcttgatggtgccattccagcaaatatttctatgttgcacaccctcaccgttctagatttgagcgtcaataatcttactggtacgatcccctaccaactcagcaagctccctagactcgcccacttaaatcttggagataaccacttgaccaatccggaatatgccatgttcttcacacccatgccctgtttggaattcctatctctatttcacaatcatctcaatggtacttttccagaattcatcctcaatagcactagtttgaggatggagcacctcgatttatcgggtaatgctttctcagggcccataccagattcactaccagagattgctccaaatttgaggcatctagatctgtcgtacaatggattccatgggtccataccacattcactctcaaggctgcaaaagctccgagaactatatctgcacagaaacaacctcacccgagcaatcccagaggagcttgggaacctaaccaatcttgaggagctggtcctgtcaagcaaccggttagttggaagtttgccaccatcttttgccaggatgcaacaattatcattttttgcgatagacaataactacatcaatggtagtatcccgttggagatgttttcaaactgcactcagctcatgatttttgatgtttccaacaacatgttaactggaagcatcccatcactgatcagcaactggacacacctacagtacttgttcctcttcaacaacacatttaccggtgcaatcccaagggagataggaaacttagcacaattactttcagtggacatgtcacaaaatctctttaccggaaagataccattaaatatctgcaatgcatctttgctataccttgtaatcagtcacaactatctggaaggtgagctccctgaatgcttgtggaatttgaaagatctcggatacatggatttgtcaagcaacgctttttctggagaagttacaacctcaagtaactatgaatcctccctaaaatcactgtacctgtcaaataataacttatcgggtcgttttccaacggtattgaagaacctcaaaaacctaactgtgttggatcttgtgcataataagatttctggtgtgattccttcatggattggggaaagcaatcctttgctgaggattctccgattacgatcaaacttgttccatggaagtattccttgtcaactgtcaaaactctcccaactccaactgcttgatctggctgaaaataattttacaggtcctgtaccaagtagtttcgccaacttatcctccatgcagcctgaaacaagagacaaattctcctccggtgaaacatattacattaacattatttggaagggaatggagtacacttttcaggaaagagatgattgtgttattggtattgatctttcaagcaattctctctctggtgagatcccttcagagttgacaaatcttagaggccttcagttcttaaatatgtcaagaaatgttctatatggtggcatcccaaatgacattggccatctacatgttgtagagtctcttgacctctcttgcaatagactcttgggtcctattcctcctagcatatcaaacttgacgggcctcagcaagcttaatctctcgaacaaccttctatcaggagagatacctataggtaatcaactccaaacactggatgacccatcgatttatgccaacaacctgaggctttgtggatttcctttgaaaattccatgctcaaaccattcaaattctacgagtacactagaaggggcaaaagaacatcaccaagaactggaaactctatggctgtactgctcagtaactgcaggagctgtctttggtgtttggctgtggtttggagcactgtttttctgtaatgcatggaggcttgctttcttcagtctcatcgatgccatgcagcagaaacttatgcaaacataactcatctgagtaatatgctctgcttctcaagttctcattgagtccacctgagcgtgtgtattagtgtcacattatgtcagcactgcaccaagatctaaggttcagtaggtattatccctttatttcagccatcgatgagatgtaattttctgttgccagatttggcttgttgttcttgtgatgatgaactcttgttactagcttttagtgtaagtcgggtagcatccttggtcagaaaaaaagaacatgttttggtgatgagaccaatttcctacatggttgtgtttgagatgaaagtagcatgtaagccaggaagttccaaataaagtagcatacatcatggctgtcttttgatgtatttgcaagctttgttattacctgtgcatgcatacagacttcatttgacgctaattcggagaattttgtcttattttctgttcatactgtaaactgtatgtattctgttttttttttctcatcagctataaattactacagcacacttcaaagcaaaagaacacagctttgccggttgcagcaacgacactgaacacaacaagaacacgcgcagcaaaatttctactagaatttcaccaaattcaaatgacaaaagtgaagaaatcgtaagaacaaaatcacgctatcccaggaagaattgcaaatcaactccccttttgatcagtggccgctgttcacgacagcgcagttcctcctgatctccccatcggagccggtcttgacctgcaccgcgcccagcgtcgccatcgaccggccgaacacctggaagaacacctccggcgggctcgccacggcgccggcgatgtcggcccgcgccgccgcgtcggtgactagcgcggcgtcggaccggagcaggccgcggtgcctgagcaccgcgcggtagtagccgagatcgaacgtcaggtggctgccggggtccatctccaccacgccgtcgccggccgtcctgcacttgcgctcacgcaggttggcggcgtaggcggcgtccagcggcggcgggtcggtgttgttgccgttggcattgccggcgccgccgccgccgttgtagaggcggtcggcgaaggacgagcagtgggcgatgccgatggtgtgcgcgcctgcgcgatcggatgcaatttttcagaaatcattttacacccaagaattcattgtgataatgtcacacatgtgtccttaactcctcattcttgcacaaaatcatgcttgaatttttatgatgttggcttgctgtagatcgccattttctggacatgaatcgagcatccaaattttcggttgatttgatgctaacttacgagattatataaatctatttatttcagtttatttacattggtcataaatcataactgtagaaattatgacattgctgaacaagttaagtcagttcaatggtagataaaattgactagtcatcaacacgaactgacagatagaaagcaactattattcgtgctccttttgcatgcagacatgcagatgcctagtcagcaaacaaaggattggaaattcagacacaaagctttcctctctgaaattaatcttacagcttctacattatgtctcccaccgacagtgcagattaattacatgctaatagtgtagtttggatctgattaactagagtaatctgtttagtttagctgataactgagattaattacatgctaacagtgtaatttggacctggttaactagagtaatccaagttgtttagtttgtgcagataagtggtactaagtatcctcggtttcataatataagttgtttcgaattttttttgtcaaatttcttgaaaatttgatcaaatctctacaattataaaaattaaagatatttccgcgatctgttatctgtgtttgagtcggttttaattttatattttgattttaatctataactctatctcttgtctactattataaaaattgaagatgtttttaccggtactttggtacgtcatctttgtatgagtcgatttttaagttcgtttgcttttggaaatacagatccgtatttgagtcaggttttaagttcgttcgcttttggaaatacagtcatataagaaatctcaataaaaaactcacatgctaacttggcatgattttctagaaaaatatatatccaagcgaattctcacggtgaatttcagagtgaacaataataagattaaaatagacttcacccattacaacgcacgggcattttttctagtttataaaaaaaatataacactcataacaccaaattaatttcattacatctaacatttaacatattttgataatttctttgttataggttaaaaatattgctatgtttttcaaacctaaataagtttggcttagaaaataatcaaaatgacttataatatgatgaaacgaggatagtaattaataatgtgaattaatgaattcgttcataatcgtcacgtacctgacagccagacaaggtcacgcacgctgaggcccttggtggcgaacaagccggcgagctccgggaagctcatcgccggcgaggggatctccgcgagcgcctcctgcatgctcgacaccgtgccatccctcctccccgtcggcacgcgccacgacggccctccctgcagagcatgttcagcatcgtcaggctccggccagtgcgcgcggcgcgcggcgaccgtggcgagcgctcgagagcttacgatggcggcgacggcgtcgcgggcggcgagcgcgaggacgtcggcgcaggagacgacgcccgggcaggccgcctccacgaggcccttgacgcggtcgatgaggtcgaaccctcgcagcgtctggttcggcgccgcgtccttctccgccgcgccgccattgccggtcgagttgaggaggatggacgcgtcgcagccctttttgacaaacgcacaacacattccatcaaacacattgcagacattgcacgcgcatcaatggcggccgcgcggcgcggcgcggcgcacgtaccctgacgaagcagtcgtggtagtgcagccggaggagcgcggcggcgacggtggggacgcggccgacgtgctgccggacgtactccccgacgatccgctccgccgcggggcagctctcgtcgtagaaccccatcctgagctgcgcgcgcgcgccgccgatcacgccggcgccgaggacgacgatggccgccactccgagccggatcaccgccattggcacgccgcccgcgcgtcgcctcctcgtgctcgccattgccgcccactcgactactcaactcaacttaactcaactcaaaacttgtgaagtgaaccgcttatatacactagtatttatagtcctgagcttacttaacagacatttcttcagagagtgagattacttcaaacttagttcgaaatctattttttgagagaaaaatgcagtataaaaagcagggtaatttaacttggattcgccaatgattttgaaaggaacagtgaaaaatatgcctccacatgcacgcacgcaaaatggaaccgggagaagcgtgtgacagtgtcacttgattcctctatctatttctttcgctttaatttctctgctttatatctagcttcttttagtctttttcgaatcatgtttaacttttgcaatcttgatgatgaattgatgggtgatcgattggtacatcgtgggtggaagaaagagcaagaaaagaacttgatcctttcctcctctttcctgccattgccttgcttaggcaaggttccaaagctctgaagcttcctcctcccttttgtcagacttttggcttggatcattttttggattggaaagtatttgtcattgcttgataggttgctgtttggtaatttttagtgccaccaccgacaacagggttgatcgggattgttaaatcatgcattcctggtcacaattcgcaatcacattcatgtggaataaaattgatgaacacgctttgctgagaaaaaggaagaagagtgaactaatacgtttttcaatttcggtgtatacattataagctttatattaccaaggggcaagggaaagtttagtaaattatcgcgtatggcacagccacggatcaaaaacaatgtgagctcaaatgctatgtctcggaaacatgtccacctctccatcttctatttgtgttccaatgcttatgtcaatcaatcagattttggtgatgcacgcatcagagagaatttttcccctagccgtgattttcctttctttctaacggttttgaaattgcaagtattggagtatatcatcattctactattatcttccaatgctacgaaatagagaaatcaagcagcgaagaaacaaaaagatgttacatgagatgacaaattaaagcccaattacctcgaatcatatatcaaattgaatgtcgcaaagatttcaacacacgcctacagcgttctgaaaagaaagcccaaatgctcatagtggctccaaatataaatcaggacagcatagtccttccagcatcacttccctccagaataatcttttatatcccataggccattgcaaagctcattaagataaaagtaaatgacgatttaataagaatatgcagcattttcaaacttgcaactcagataaaacatcaacaggaatgagatgcaaatgagcaaattgagcacatatttaggttcaaatccaacttattcataaagcatactgctgtcccacaggaaactgtttcataaaactaacatatcatacggactcgatggtccattaaaccagacacaagtagacatcagcaccacaaatacttgacgaacagaggctcgggacgaccaggcacatcggcagctccaccaaactggctgattactgaccaccacggaggcggagcaccaggtggagggtggactccttctggatgttgtagtcggcgagggtgcgtccatcctccagctgcttgccagcgaagatcagacgctgctggtctgggggaatcccctccttgtcctggatcttggccttcacattatcaatggtgtcggagctctcaacctccaaagtgatggtcttcccagtcaaggtcttcacgaagatctgcataccaccacggagacgaagcaccaggtggagggtagactccttctggatgttgtagtcggcgagggtgcggccatcctcgagctgcttgccggcgaagatgagacgctgctggtctggggggatgccctccttgtcctggatcttggccttgacgttgtcgatggtgtccgagctctcaacctccagggtgatggtcttgcctgtgagggtcttgacaaagatctgcataccaccacgaaggcggagcacaaggtggagggtggactccttctggatgttgtagtcagcaagggtcctgccatcctccagctgcttgccagcaaagatgaggcgctgctggtccgggggaatgccctccttgtcctggatcttggccttgacattgtcgatggtatcagaagactccacctcgagggtgatggtcttgccggtcagagtcttcacgaagatttgcatgcctcccctgagacggaggacaaggtgaagcgttgactccttctggatgttgtagtcagcaagggtcctgccgtcctcaagctgcttgccggcaaagatgagacgctgctggtccgggggaatgccctccttgtcctggatcttggccttgacgttgtcgatggtgtcagaagattccacctcgagggtgatggtcttgccggtcagtgtcttgacaaagatctgcatgccaccacggaggcggaggacaaggtggagggtggactccttctggatgttgtagtcagcaagggtcctgccatcctccagctgcttgccggcgaagatgagacgctgctggtctggggggatgccctctttgtcctggatcttggccttgacgttgtcgatggtgtcagaagactccacctcaagggtgatagtcttgccggtcagagtcttgacaaagatctgcatgccaccacggaggcggaggacaaggtgaagggtcgactccttctggatgttgtagtcagcaagggtcctgccatcctccagctgcttgccagcgaagatgagacgctgctggtccggggggatgccctccttatcttggatcttagccttgacattatcgatggtgtcagaggactccacctcgagggtgatagtcttgccggtcaatgtcttcacaaagatctgcatctgcaagaaataatcaccaaacagatagggtaagaactagcacaagattaaggacacaacaacggatcaaacagcaaacatattccaacagaacatacatgtattcaaaaagatagtaacaggcacatcacacatgtattcagataggtagtaacagcacacgtatcctgaacttcagaaataagtagaatgaactagtggcaataatcttcacacagatagtaaaaagaaattaccacaatagattatatagatgaactacagattgtaacatgatattactacagattgtaacatgatattctaatatagttcttagcataaattactggcagatagtaacatgagatcattatgacagatatagcgacaagacttcctatttaccattgacaattaattaaaagagttcatcattatctaatctgtgaacatatgaaatcaaatcgaaacgcacaagctacataattgaaccatgtctaagaagaactaccctacagatctacatcaaacacaaaacagatataacatattaaagcctgtgtttgcaccaacccatggcaccaataactcaatcaagagcggaacagtagatctgaacatgctcgcaacaaggcctacaagatggaacacgctacaaatcgcaccaatcactcaggcatgactagttccacaattccccaacagatctacaccgatttccccaatcgaatcatccaacaattcatctaaccgtaaaaattccccccaatcatcagaaccaacatccaatcccaaaacctaaccacgattccacctatcgaaccaaccgtgcccaaatcacaaccatcagatctacaacccctaaacatctcacgataatcacatcgacaaccctaaccaccaatcggatctagcaacaaaacaacctcacccgtccgaaatcgaatcgaaacgaagcgaggagaggagaagcagcgtaccttgaggacgcgagaggattcgattcgacgacgagagcctcgcgagattggggagaaatttttcgggggtggagctgatgcgaggagaggagatgagggggctggtatttatggcggttgggtggtgggaggagtcccgtgccgtgacgtctccgtctgcttggagaatccgccacgctgaaaccaccgcggtttccgggaagacgaggcgggcgagcgagcggttgggaaatttcgagaagatgccgtttgtctccgtttggtacacgtctcgttgattttttttgagtgaattacgctttggaccacattttattatctataagttttactttggactacctttaaacatatcttttcactttgaaccagataaatttgctattgttgcgatttggatttttttttctcgtgcaatcaacgaccttaaacacatcagctctagtatacggccgatctcctctatatatggttcatatgtttgctgaaagggaagttagacatgacgaaaagttgttcatggtagtccaaaccacaacccggcccaaattgaaaagataggtttaagggtgatccaaattgagacttaggtaataaaaggtggatcaaagtgcaatttactttttttttactgtaatttcttctggctggtttgttggtcgccgttaggaccgggtgacgccgtcaaccccgcgcctccgtatttgctgacgtggggtggcgcgctggcttccgccttgacccgaatttgttttccttccgttaaaaaaatggttttccttttcttaaaaaggaaatagtttgttttttaagtctgtgtattaggattattacacttgaattttggtatatgtgtaggataatttactgcatgtttataatagagttgtactatagatgaaataacccaatttttggtataattcgtgtttggttggaggtcaaaataacaggttattttgtgaagaaaaaactccgtagtatagtaccatatccatcatgaatacacatactgcctagacgagtgattaggatgaatccatgttatattcctcaaaataatataaaccacttgatcttatgatcttatccaatctgttcatataaactggagatataagatggtgcatttcccttttgatttcttttgttgacggccatgagataggtttgcatccactgcatttatatttcggaccaatacaatgcacctattgatacatggggacagctcaactaaccatgatgcaaattgctggttggtgaccagttcttggcattatgataatgataggattaaaaaaaacagtgcaatgtctcggaaagaaaccatgacaaagggtacatgttgcattccagtttctaatgataaaattatgtgccagcaattcaaaaatcatgcgtgttccctacgcaccattctttgcaataaacaagtgcatgcacaatatgattgtgctaagggtcaagaacttgttgcagtggctaagttttggataagaccaatgaacaaacagtactagtagtttgttttatgaaatttgcatttctgcagctgttttctaacaatttcatacggcagcctatgctgattcacttggacattgccccctccataattctaatctttggttccaaataaaatcatgtgtaaccaaactgttgtagtatgaattatggattggtgtccttttttttccctccggactcctattggcaatgtaagactatatgaagtatcagatgccactcggttggagatttaactgaatttgacatgaataggcaagatcacacaaactaaagtgctccagaacaaaaacatgcagattaggctaccaacaccagcctgaaactgttcatggacttgctgcatacaaacaacacagtatataccatgagccctacaaggctatatgaatactgctgagaaagggagaaaaaggtgaggtaagaatgtagaaattaatagatactgtaaacaaactgatattccaatactaccatcatcttgacaacagcttgcttaaatcagaaatccacagttaccaacagtaatataacaagagttaacttcaacagtatttatttgtgcaacttaaaagacaccataggaagccttgaagctatcacccctatgctgaagtactgaaatgagaggaaaccatgtcgttcactcctttttcccgactccatgagacatgttgtacaccccacggccctgtttataaaacaagaaacatgtcactgtctgaacgtaaacaagaccagagaaaacaagcaacgcaggaatcaattaaaagaaccccagactcactatcataaacaagctggaggcggcaagagcgaggggaatggcaacggaggtgaccacatcataacgccctttcagatacgtgtgcttggtcaagttctgaaaatactgctgctgcttaaagagcctctcgcgcggcaaaaacggtgattctgtcattctgcatcacaacagaaggaaccaagacaaatctatatcaatatggaaagaaatttatctttcttatggacatttttgcatataaagaaaaacatacagaattagtataattactgtatttgactttgagaactaatgacactagaaatcatcactgttttccttaaactgcttacttagaggagtactaactaactgctatgcagccatatataagttgttaaatttctctcattagcacctaagttaaaataatgttttttacaaattaaaatacagctttaaacatgacacctaaacacatttcttcatgtgaagcaaatccatgtgttgtaaagcatacaaattttttttctttcatgatttaagcctaactagcgaaagtaccccagacagcgtgaactgtgatgcagaaagagattttaagccaaagaggtttcttggtcatcatcgcatagtttcatggctgaacatggctcatgaccaggattttatagagttaacagttagtcactcacaatcttcaaatcacaaaacctaaaaaaggaggtctgaagtatcaagtatgcaacaaagcatgcatatgttactaagcaacattgtatccgaacagtcttacacctattcaaaattacatgacctcaaacatacatgacaaattatacacctagagcctaccacttcattcctacaagcataatacaagaagttgacttgggcccaaaacagaaacaggttcgtcatttgtcaagcaagattgggccacaccaatacacaagaatattttattatgtgagcatagctgaacaatttctgcggggttctgaaaatcatattggcatcagagtcaaccaaagacaaacagatgctaaacacatactggtacagatcccctagatgtagccacgtcaccttcttctcccctttatggtgaacaccccttcctccatgcacgatagctgaacacctctccctctatatggtgttgcataatttttcattcacgcaatacatctatcacattttatcggtgaggcaatgagttatatattcgtaactaataagacaatgaataattttaagttacggcataatgctattttgtaattttcactgttgatcagctaatgaaatactccctcccttttatataagagaaaggctcttttgtatctaagaaaaaggagatagtactaaaattaattcaattgcagtaaacattagtgtccaaagtttctgagaaacaagtatataactactaatatgttgctgtttccagtgtgatatgttttcacacaagatgttccttctccaatcaaggattggttgtcaactattgatagagccccagaagctaataagatacagattacagagtggcatgtcaaaaggcagtataggtcccggatgcatcatgcatatagattgatgtgttgcagcggagtaagaatatcaggatcgaaatgatgtgtgacccgctagaaatcaaccaatggcttagatcagctgaaatccaccagattgatttggaggcaactccagggcatctgcacccaaactgatacagcgagatacacatacaaaaacacgcgagaaattccatccacgcatcaccaaaaaaaaaaaaaaagggcctcagattaataacgctccacgaatcgcgcaggtcgcaccaacatcaatcgcgtcaggaactcaagaaacacgaacagatctgctccgccattaaaacccctcctctctcaactcccaagcctcccaaccatcacatcgaacatcgaaacaacgaggcggaaatacaggaggagggaaacaccgcaccttgagacggaggcggaggaggaggacgacgacggattgattggacgatccttgcagcggcttgggggattttggatggatcgcggcgagaggtgaaacgaaatggggggaggaggaggcaacgacgaagaagcaggaacggcgaccgagtcggggaggagacgtcttgggaggaaaatgggccggattacttctggcccaacaccaaattttgggccaataataaggcctagtagtactatcaacagctgagggcgtgtttggttagctgcatttaagactatggctaataggtggacgattagctggtatagacgtggaagaggaaaatcagatgtgagagaaagaagctggctcctttacaatcgtccgcttggcatgagcgtctaggtgctttgacaacctagatccacgtcaagagatgggagatagagtgtacactaaacccacataatattaaaacaaaatattaatactagaacaagtgtgtagagcctgctataatataagatttagagccgatggtgggctcctatattattcttgatctaagggtggctcacacctatgtgtgacagttatttggttgtcagtatgaccgtcggggtctagttccagcattccattcatgcgaaacaaacacctgatccaaaatcgctagaaacacgaggaggtgagcttcgttcctcatgtaggttatgctcgtgcaggcaccaggtcggtgtaggaggtgagatagggtcacacattgagtcatctctctttctccaaatgctagtttgtgcctcccaatttgttgtcgcctccatcgtgccccctcaccagtggatccccttccccctcctctttggctatttgtagtatacggtgaaccacaacctcacaaccactagatctgatggtcgtaagttcagtactattggatctggtagtcccgacctcagtttggataaaacatatgagccaagctaaaggcattcgggtaaccaaacatactcttaaaatgtcatgaattttcatgtggggaataaattgattcatgtgaaatttgtattaagggatggttaggttctctattctataaagattcagcggcaccgttaccttttccctttaaggttgcgttcgtttgtgtcggttgggagtctatccctccggcacgaaaaacggaacagcttattatcgcataattaattaagtattagctaaaagtagctttaaaaatagattaatgtgattttataagcaattttcctatataattttttttcaaagaacacatcatttagtagtttgaaaagcgtgcacacgaaaaacgagggagagggattgaaaacctgcaatgccgaacacaacctaagaagggcttgatttctattagtagagaaaatgtggccaacatttgagcccgattttattagcattatcaaaaattgtgtttgactaaattttgatgaggtgtttagtttggtattaccaaactggatcaagaaccagaaaattgctcatgccatctctactagacgtctttttattgtgatgcttctaattaaactgatggatcctaaacctcttaaaccaaccgtgtcatgtgactaagtgacaactaacaaagatctctaaccagctaagttccacaaaaaaaaaaggtgatttttttatttgaaacgatacgcaaaaacaagaataagccttcagaaaaagaaagaaaaaatggagccgatttgcctgccaacagctgatccaagcctatcagagctgatcacacatgatgatcatgccacgattgacttgcaaatttaacggttatggattggtaggtgcgaggcatgaccggatcctgtctcattggcgtccatcatttcccaaaatcttatccagccaaatgtttctctcctctcctcttcatatcactgtatcaaaatgcatatatgattctaaatttctaatctctgtacctatcctaatccgacaggaaacagcttaattatcctacacttacatgcctgcaacaccacagaaaaaaaataggccaaaatgtattgaggggaagggcttagctggcctcttttctgtgccaagaaacaatgcatctctatctatagcttgcatatatcaacatatatattatttttatatggatcataatggaggtttctttttgtgttaaaaagttcagaaatgaggtgttcattgctgtgatggtttaagggtagattagtactagtggatacatcagtaagcaaatcagagaaggctgaccaagtttagacagattacagatggtagacacctgttatttctgcgtgatgaaatggcaacttgaattttttttattaaaaaatgaaatgaagagatacttcagaaaagttttgatgaagagcaccaggttaattctgatatattctgataacagaacgatagtgatgcctaattttccttgcgttgtgtttttaattagcttgcaagtgatgttattatctgatacacctccagccacaaatggatatttaatatcaaatggtaacacaagcaacctctagtgattggttgcagcttggtggaaaatttcatggtgtgtatagaccctagaagataaacaaaacttgttcataatacaaaattaagtcatcaggatcaggaagagatatccagagaaaaattcaaacacatagtgaattaagtggaatgggacagatcatcatccaccaagtgtaggaaatacgtttctttgagccatagaggataaggcactgaagaagtaggtcatactagttccatttgaaatgtctgcatgtgttgtgttatattgttttcttaactaacaagcttaggcaaaaacaatgagcaagcaatgacaaaaaaatccactggttttcttctttatccaatataaagatatgcagccctcctgaaagttctagacaaaaatgtgatgtaaaacttcatctgttaaagataaaattggatattttttaaataagaagatgatttgctgccatgtcagtaccacctaaaaagagccattctatgcaatgatccttaaaagtactaggactatactatacatctgatatgtaccatatcatctattacagagttaaccagcctattggcctgaaatctttcaataatatacctacccatttgagctgcaaagtttgttgttttacttgtttgcatgacaagtcaggtgtaagacggaaaaacttgaagcctgacagttaatatttatatgaaatcaccagtcattttcagggaaaaattatgcagacaccagcctcttaggaaaattatgcaggaaaattataatattttcgatgttagttcccgttgtatggaaaacaagatctaagtacagctagaacagtgcaactgcgcaagttgttttttttttcagcaaggcttgaatggctctcaagagaactaaaatataaaattggaagagggggaagaaggtgcagccaactaactaacttgtgatcatatttaagcacttgtcatgctaccctcacagaagatttagttcctcctctgcctcttctccatctacagaaaactacttgtgctaatcaagttttatcttgtttcttccccatctctttcttcttgttgttcttcagactgaacttagtctgaagattcagaaataaagtgtgattttcaaagctttgctagttgcaaacgagacactagctttggagtttggaggtaagctgctgtgctttccttttgccatatgcgattcaaaatatatgagtctgtagcacccaagctaatttttttcttcacattggtaatgaacattgtcattcatgatgtagggagatcttgcttgtggagaaactcacaaatggcgataaagatgaagggaatattcaaaggcctgaagataatctctcaaatgttcggtaatactcctatctttctttgtttccctatatctctgcctgcttacattacttaagcttgcattttgttgattctggtttataaatccagattcagattcaagaaaatgtagtaaaagcacaataagatagtactgtgtgtataaccgtgagaaatcacagaaagtgatcaatgtacaacaataagtttataacacatggtttctttttcttttgcagtgcataaggagcatgagatggaaattgggtaccctacagatgtaaagcatgtggctcacataggtttgggcaccagtgacacatctccaagctgggtaaacataccaatacttgacagccttttcatcagatgatcaactactgcattatgatttatgaatgttttctgtttatgagttttgcttcatattctagtatttctaattattggaaatgtacatttctcactttcagatgaacgaattcacgggaacagaagatttatcaaccggttctctgagcacaactgcaccatcaaggcagacttcttgggcctctttaggtatttaatgtcctctcatctttctatgtttatccttcaaaaataaagtcaatacaacatatataaaggttaatcaaacaaaagattctaaaatatgaagttccattggtgcttttgaatatgccacttgagccatgcctgatataaaacgtcacaatcatccatagtagtctaattggtcctgaatcttcagaactaatcatttattactatataaacgttggaaatcttcttgatctattttctaaggacaagtacttcagtagtggcacaccacttacaccattttctttttaggttgcttgcatgtttacaaggtgcaatgaacagatatacagaaaaatcatcaaacatggtatccaaacattcatgatgaccaaataatattttttatgcagattttgaacagccaagaagcatgctgccaattgagatcttgccggagaaatctggccaggaggcaccctcctgccctgacatcccaagaggcccaaggaaggtgagaaggaagaagaccagaacatcatcacctacctcatctgcaagatcatcgtcctcgaggtcaagaacctcgttcgcaaccgcatacgacgcattcaacgaatcgcaaagagggtttcgggttgcctgaaatttacagattgtgtttgaaactaccatgaattgtacattgtatgtcggtataggaagagaattgattgtgaattgtttgattctttctttttctttcttttcttttacagtcaagacatagttggaaatgcaaaggaaaatggattaacttaatgtttgaagttgtgtgcatctcaaattttatacttctgactaattcttcagattcttttaatgattggatggcagtcggcagatgttagacttcagtagtataatattttttccccacttcagattgtggattaaaaaaaaagttttctaacatttttcaataacatatcaatataagtaagcttgattcacatcatttttttctgaaacacatacagctgtgagggggctaataatgccattgatcacgacatgcaaggaccaagaacaattcgactaactttttttctacgccaagttgccaattgccaagacaaacgtgcaattgacatgatgcaacgtttcatcatgcctcagcactttgttcaaggactgtaataatgtgatacacagctgatctaatcatataaaaaaaacacttggaaatatcatcaatctttatatctcgtgattatgcactgcactctgctttccttgcatttgggcaaagcataacctgagcatcaagggcaagaaccttttgctacctatgcaaccttacaaaaaaaaagaaactttttgggagtaaattaatcccatttttaccctgacataactattcaggtcttttgcgttgatcaacttaacctgaccgtgagtgcaatgctaagagcaaagtcatggccctgcgttgaccgacgtatcacgctgtgccacgtgtactaactaaccacatgagagtgatttgacccaaacaatcactacattggaaaatgacttttttttttccatgtaccatggactgactcacaagccatgaatattccagtgtcacctggctagtcttgagctctgctgtgaatgtcaggtaggcaaccatggcattgcaacaagcacaagagacagacaagaacacaagatggaagtaaaggtgaggtgtcatatgctttggaagctaatctcaaggtgtccatggaaagcaaagtacaccacagcttgtaaagctcccagccattgaggcctacaaatacccggctacctagcttggcctcttctcatccaccacaagaagtgaaaagcttcactgagcttgatcaattactactagttaattacctatagctaagtagtaaaaaaaaaactagctggttttggtttttgttgcagtgatcaatggtgaaaggtactagtggttacagctatggccttgggcttgcctgctttgctcttgtggttgccatggctggagctactcagctcaaggtcggcggcggcaatggctggagcgtcccggccgccaatgcggagtcgtacaacgattgggccgagaagatgaggttccagatcggagacaccctaggtaatcaattgattaaattcgagttctttgcgacaaatattattccatgcatttgtgatgaagcttttgaggtactagctctgtttaatgttacgagtcgttttgactttttttttaaaaaaattacaacctctttagcttcatcaagtttacagaaaaatatattaatattttcaacatataacaaataaaaactattaaacatattcaatggtagagttaataagactaatttagtgttataaatctatattttttctataaatttaattaaactttcaataaactggactttagaaaaatcaaagcgacttataataaaggaagtagcgcatgatcatggcggatcatcatctatggacaatggttgcagtgttcgtgtacccgaaggacaaggactcggtgttggtggtggagccggccgactacaacgcgtgcaacacgtcgtcgttcgaccagaagttcgccgacggcaacacggtcttcacgctcgaccgcgccggcgccttcttcttcatcagcggcgtcgacgccaactgccgcgccggcgagaagctcatcgtcatggtcctcgccagccgcaacggcaccgccaccgccaccgcgccgtctccgcccccggcttcgtcgaccgcgccgccgccgacgtcgcctgcacccgccagcccgccgccgtcgtccccgtcacctccgcccgcttcaccgccgtctcccagctcgtcgggcgccgctgctccgacgacgccgccgcccgcgtcgtcgcctccctccactccgacgccagcgtcgcctgcgccatccgcgtcgtccccgccggcgccgccatcggcgaacgcgccgagcgcgcagggggcgaggaacccgagcgccacgtcgtcgccgccgcccgccgcgaacggcgccgcgcacgccgcggtggcggcatcgggcctcgccgccggcatcattggctacgccatgctcgcactctgaagtctgaccatgcaatcagtgcaaaagtgaagctgttgtaataacttgaattaatttggagggagatgatttgtgtactatacgtgtgtgtgtatgtacatcgtgtgtttgtattaattcgttttccaaaggatgaataagaacaaaatgatatcgagcatttgtgccaaaatttgatgtgttcaaatccaaatattaacccttgtttttttatttgaaattcgtcgccggctgaagtgcaggcaacacggcgcgtttcagccgacgggggcgggtacggggattcaatctccgatcccggataaatcgttgggctgggccggcccagttgtactttccagcccgtttgtgaaccgttagatggtcgaatccatgacctcatgcctaacaacaaactcttccagtttatgaaccgtcgttagatggtcgaacccatgacctcatgcctaacgacaaactcttttcagtttaaatgtcaaaaaacaaactcctttcagtttatgaaccgttagatcatgtggagattcgtgcaggagtctgcatatggctggggtcgacccacgacattatgcctaaagacaagctgcattaaccagtgagcctcgtgcggatttttctgttgattttatagcagttacatataggttagttatagtaacaatatactccctccgtttcgagaaatatttgacaccgttgactttttagcacatatttgaccattcgtcttattcaaaaaatttaagtaattattaattcttttcttatcatttgattcattgttaaatatatttttatgtaggcatataattttacatatttcacaaaagtttttgaataagacgaacggtcaaacatgtgctaaaaaatcagcggtgtcaaacattttgaaatggagggagtagttaaaacggacatacactccaattatactacagctacatttaactttgcatttgaaagttcttcataaaaaaattgttgaatgttgtacaggtactcccaattaaaaaatcatcaagaggtcctttgaaaagagtgatttaggttgtgttagagaggaggggttgggaacgccgaacaccacctctccagtatgcaaaacgaagcacacattagcatataattaactataagtattaattaaaaaacttaaaaatgaattaatatgattttttaaagaaacttttctatacatttttaacagtttgaaaagtttatgcgcgaaaaatgagagaggtgaagttgggaacattaacttaagaacataacttttctttttggggaatacagttaagaacacaacttatatgggaaataaatcagctcatgtaaaaatagtttcaaatttctatcctttcatccgaaaatataagcatttatatagtttttcacgtgggttaacgagaggagtgaaattaaacgagaatggccggttgagatggaaaagttggtagagaaattcaataactgatgactgtgaatgattgatacgatgtagtaggtgaagatcttataatctaggataaattttaaatgctacaaaccattgtatcttggaactgatgcaacgcaattgcacgccaactaacgagctgattttctaataaacaagtaaatcatccatcatcgttcacccgcatttcatctacttcaatctacattgttccacccaaattcaaacgtaacttatgatctctcaaatcaaacaggtattatagtttctggtgtttctctgctaataaatcaggatcagactaaaatgatctcacatctttaaaaaataaaataaaaaagagaggcctcctcctgctctctcccgacaaatgacattggctgtcaggcagcctgtgcccaaatcaagaatcatattccggtaaaattatccagcttagccccgagtattattctgtccaactttccaagctcgatcggcaaagcatcgattcgaaaggcgacgcagttgacgcgatcgacgggataaacacagcatgaaaagcgatcgagagcccccagcacatgcccctgcatgcctgcacgcccgagcaaaacgttagcttcagcaaggcaccgtgtggcctacagcttgtaaagcctctccccgatcgatacgcctacaaatacacgcgagaaacctgcaacctgacgaaaccatcaccaaaattcaggcatctatcgacagaagcaagatcaggttagtttgttcgttgtgcatggcagcaatggcgagcagctgcagtgtgcttgttgtggcctgcagcttcgctgtgcttcacgtcgtcgccatcgccggcgcgacgcagtacaaggtcggcggcgacggcggatggggcgtgcccggcgccggcgacgagccgtacaacacctgggccgagaagaccagcttccaggtcggcgaccagctttgtaagtatatttacagttagctgctttaagattcagccgttattatttttcgagtgcacggcagatacatactatatacacatagtgaggtgagaatcatcaactataatgtcatcatcattacagtcactagtatataggttctactcttttattgtcccacatgtcggtgtctataataataatgtcattatgatagagaatatgaactcataaggacagacccagccctcggcccctaggtcatggcccggaggcctatggctgaacacccatgtaccttttttttttttgcaccatgatgataaaaaattcagtacacgtgcaacattacagtcacacttttgagtctatagcatatgcgcactgacacataccacaacacacgtaacatcacacttacacaccatgaatgtaccgatcttattgcgacatgttaataagcattttttttaatgtgtatgctagtgttcgtgtacccgaaggacaaggactcggtgttggtggtggagccggcggactacaacgcgtgcaacacggcgtcgtacgacagcaagttcgccgacggcaacacggcggtcacgctcgaccgcgccggcgccttcttcttcatcagcggcgtcgacgccaactgccgcgccggcgagaagctcatcgtcatggtcgccaacgccaccgggagcagcgcttcgccgccgtcctcctcgtcgtcgccgtcgtctccctccggtggtggtggtggcggtggcgctccagccgggcaggcgccgccgggtgctccggccacgccggcggggacgaacagctcgccggctaacggcggggcggccggcggcggcgcgaagagtggcgctgggctcacggtggcggcgagcggcctcgccggctctctgatcgccgccattgcctgcgtcgcgattgctatctgaatatctgacactttgcaagagaagatgccgtttattcgtttattcagaaagtgaattcttctgttcgtttgatgtaaaggcaatgtaccttttagtttgtactacttgttattttcccttgtattgtatctttgttttttcagacaaaccattataaactgaagacatgcaattctaacatgggaggacctaaaaaaactgccacaagtttttggaataaaaaactttcggatataattaaagtgtaattacgttgtaagtacattataactacactataacttatataaaacttgcatttgcatttgcctatggtttggttagttagcattgagatatcttacacatgacacttgtgaaaatttccaatatctttgtccttggatagcggcagatgtaaaagaactaaacttctataagaagttaaataatgagaaactttacagaacattttcacagcatatatggtcatcgagcgcctattctagccccagaacaaaggtaggatgcacgagttttaggtagcttaggtaggatgacaaacacggctagcttaggtaggatgcacgagttttaggacctcagagagaatgaatcacctcctaatgctagcttaggaatgactagttctagtacttcatataaaatgaaaaggaaatgctattcttctgttgacagaaaatgcagtgccaaatggatcaaaattcaactttgcagtatatcgccagaggccacacccacatcgtaacatgtagaaagcatgcgcagatagcataagacaatccaaccatattataaggaaccacgaaggtacacatattgggtttgttaagcatgaaaactggaaatttccttgaaccaaaacatagcagccgaattaacttgacagtcaacaattcaggacactgagcaaaactaaatctctcttcaggaacattgggagctatgagactatccaaagaagagatgctccatggcgacaagttggctgacaatacatctacagcctccttcctctcctacctccctttctgcgggtgctgtccgtgggaaccggggtcacatcctctgcaaaaaggatcagacatacaatcatcacaatgtctaaggaggattgaagcataatgagcctgctacaaacactatccacagcatagatgaaacaaataactatctctatatccttaggttgtatgagtgaaactctgaatttaccaatgcgaccaatcttcatgccagagcgagcaagagccctaagagcagattgagcaccaggaccaggtgtctttgtcttgttgcctccagtggcacgaagcttgatgtgcagagcagtaataccaagctcctggaaatgttcaacagaattttaaaaatacttttaaaaagtcactcaagaactgtccatctgtccaattgagagataatgtttccatacaaaccttgcaacgctgtgcaacatcttgagaagcaagcatagctgcatatggtgatgactcatcacggtcagctttgaccttcatgccacctgcaagaattcagggaatggtcaatttacctcatcagtaattgcagctagagaaccaaatgaaataaataaacacaaatcataccagtaatgcgaacaagagtttcccttccagacaagtcagtgacatgctgcagaggaaaacattggtaagaaactgaataggtggttagactagattgaaggatatatataactggaaaaagaagtacttacaatgaaagtgtcattgaaggatgcgaagatgtgggcaactccgaacacatactctccttcacggacagtgggtccaagagtgacgttctcctccttgggctccctggtcttcctcttcgactggaggacgagtaacagttaagctatggaatgagaaggaaccagctacagctacataacaattacatttctacatgccaagttgtgacaaaactaatttatgccataacctgccatacaagtaggtgtgcacagtacactaagaaattttcatgcctctcatcaagtaaacacagagaccttcctacatcatccaaatgttcactacaaaacatacttggagtatctatcaaaaacagtgaaacacccttgcaacaattacatttctaaacatcatcaacacaaaccagaccttgttcaacacaaaactgcgaatcaaacgccacaccaatcatgtgctagggtcatacacgacccaaaattagaacagcaaatcagtgaaacacccttgcaacaactaaacaaccatttggccatcacatcccagaattgatacaaaccctgtaataataatctccctaacatgccagatgctctagtactaagttacagctctacaaagccaactcgcagaccgtgcgtgctacacaaacctagcatcaaagctgcaaatccgggcaggaatttgacccgagatggggaacagggggggactttggccttaccatggtgggacgaggcggcggagatcgaggcgagcgccggtttcctcctggtcgttgagatcacgagctcgccgccgccggagacacgagagaagagggaagggtggagcagcgagtgagctttatatatgggcgcggcggcgcgggggctagggtttgctgcggaagcagcggtgtccaactctcccgctgcaagtgggaccaggagtgttatgggctgggccaagatgttgtggacggcaattgacggcccaggttagcccatgctgtaggggcggatgggccaaacaagcagagaataattgggccggtcaatgtgtgcgctattttttgaacaaaaatttcatagagccacatctttacaccgataccaaaatttgaatctgaaacataattttgacgttgattttaaggtttttcatagtttttttaaccttgatgtttaagtcattaaaaataaatatgtaaatgtttaaccataatttttttatcagtaatgtaccgttgatgtatttactagcaattggccaaccatgcaacgatagcctcacgaatgattttagctgaatatgttatttacattctcagcaatcactataagatatacatatgtttaaccgtttgttttatttttttttctaaaaaagaacacgtagctatcattttgtctcattgcgagttgatttattattaaatatacttaaaacatgacctacattttttttcatatttacccaactatcgacgtacgtccaaaaggcaataatatcatctataaaaatcacttgtctcgctgttaaatagtcaccgtatatgtctgtgtcgtgtcgttgtcactgtgtggtgaatatatggtgatggatggaaaccaaaatgctctttcctcgtgtacgacggtgtacacgagtacgtcgccttcgtgcatgtgtgcccggcagttcacggcatcgcgtcgcaatcgcagccgtttgctccacaccacacaacacacattgtacggcgttgctccgtgcgtagcttaggtaacctaccctgggcggccggagcccgcctccaccgggcgccggacacgtcgccccggccggcgccgtcgccgtcgcggcgctcattaaaccgaaaaggcgccgccgcgcgccgcccactagctcgctggggagacgccgacgtgcgcgcgcgtgtcgcgcgctcacgcggcgcgggcgcgcgggcggcattaactccgccgttgaacgctagcgcgtcgcgtcgcggcatggcgcgccaacggacgccagccatgtgtgtgtcttgtccgcgtacgtgcgcgccgctggtgtcgcacagttgtgtgatccctatctcaccgtagcgtatgaactgtatgtacagtagctacctgctactagctctgtataaatacatgtactgcctcaagctgggcactgtaaaaccgtgcacacttaagcccacaaaaatcacaagctctcgcagtgtcactagccactagtgtgaggttacaaaccaaagtttttttttagttgtgtcatggcgaaggcgcaggcggcggcgaggatcatgacggaggtggcgccgccgcagctggtgtcggtgatgcggcggaggaagcaggtggcgaggagcctcgacacgatcgccgaggacgacagggagctgatgcaccaggtgccctacgccggcgacggccaccaccacggcgtcaagaagcaggctgcagcgaccagctcggcgagcaccttcgccacgccgacgttggccttcgagcggcagccaccgccggcgccggcgccggcgccggcgagcgggttcatgagggggctcagcaagtggttctccaacaacggcgtccacggccaggaggggtggccggagatcggccgcgaaggtcaccggcgagccatctattcacagcaggcgcacatacgtgggcgcgccacgggattgaattcaagttcattaactagctagtcgagtttagtacgtttatcaagatgagatgtacccaagtacccatatgcttagttatgatgaattacggcttaaaacaattttgtctccttgacaataataatatttgcaagacatagttgtcctctgaaacaaggtatgaactgttacgtaccaacaagtcagcatggtagagatgtgtactgtcaatctgtcacagcctagtatgtctctgtagtggtcaagggaacataaccaagggagatgcgtgccttttattttactatcacttggaacatgagcttccatgtacaatgttcagttcttaattacactgcactagcatctaatacgcacctatcgcgaaagaattttgctcacccagccgacctagtaacaacaccggagagacattatgttacactcaaatgccctaacgtgagcaactagcggtcgagcaccaatgcaaaactatgatgcatcggaagcgtctatgaagtgaggatattcgtatttaagttttttgtcctgaatcaaatgaaaaacatattgtaccactagtttgcatcatataattgtggattatcatcagctctcactcctgtttgaatctatctcctccatatgatatgtatgtacaggtatacaagagtaacaaactgttctctcttacatttactgctgataacctgcatagttcaaaatagaacaatcagtattatagtaaaaaatcatggcaaagtacagttaccacatacaatttgtttggcaatagaaggaaaaggatgcatacaccagtgatatgagggcttctgtagtatactaatgaacattgccgaatgggcaaatgccagagaaaccaagcttatgacttgaacaaatatcctctcatgctttctccaagcactggattgaagggctgtcaaagagtaaaccaagtcagaggccaaaataagttaaacattccattatccaaatgcattaaacgaaaacctgaagcaccagggaaaaaaaaaaggaaactacaggccaactgcagccgaatatgaaagatgctctcccataaaagctgcaaaaggtttattgcctgtagggatatttggaacttggaagcaaagaaatgggaaggtttttgagaatattactcctgaagaggaaggttggttcagaagtattaaacaggatattctcctgcatttgtgtaggatgaatgagtctcttagcccttcgattctttcctggttacagcagttgtagttttgttttgctttctttgttggtttgtaaatatttcctctactaggcaaggcctggtagtattttcctttaaaaaaaagctgtaaaagtaagagaaggcaccatctagctacagggagaacaacatgtagaacagactaatgaagagcaggaagctgcaattaaatctaaaagctaatgatgcagtttagacatcctggaaatttgggatgaaaacaaaaagaatggtagaaaacatttgacatgatagtggtaagattttcttaagcccctgccattaccctatagctgttgacttgttgtatacaaaattataaaacaaatgaagggctgaccttttgttgctcaaaacatgtagcagcaagctcttgttgatgtttctagctacaccactaaccacccacagaagattttatcttgttccgctgaacagtgccttttcgaattaaagggttttctattgaaaatacaatcaaactgccatccttggttcctgccaagaagcactcctctggagtcacaactagtgaagttatagtcttcccagctccctcatacctccatacaacatcaagagaatgcatagagcgaagaacaatttgtccatgatcaccagcacataccacaaactcaccacaacaacttagttccatgcaattgagacggccattggcttccgaagaagcaatatgttttccatttatggaatacatatgcaaggataggtcactgtcggagtaaaatactagtctgccatgctgcgatgctaccagtttcgacaagccagctcctgatggatgtcgaatggatcgaacatattttccctcacgcaatgtatgaaatatacatgttccatcttttgatccactgataacgatatctagttccgtactaacaaataagcatgtgataatatcatcatggccacataaaatatgataagggctttcgataataacatgatccttagtagacagatcataatttgcatttcttgattttttatcagctgattttcctcggaatgcatgccagatcataacagttgtgtcataacttccggttgcaattacacttccatctgatgaaactgcacagaagtgtgttgacagatgtcaagataaaagcgaaagaaatatcagagatacaaggtttcctgaccaaaataatatatcaaaaatgacaacatatacaattaataaacatcaaattaataattactagctgataacagtaaatatacatgatgctgccagttactaataaaatattatttagcaagctctgctatcatacttaggctgcgtttggttgcaggggttcccaacccctctccctcgtttttcgcgcgcacgcttttcaaactgctaacggtgcattttttgcgaaaagtttttgtacgaaagttgtttaaaaaaatcatattgatccatttttgaaaaaaaattagctaaaacttaattaatcacgcgctaaacgctgcttcattttgcgtgccgggccaaccctcactcctgaacacagccttaatttgctaacagaagttcactaaatagtgagaactacacaaagcaaaagaatggaggtgcaattgctagcacttactgtttagttactaatagtggtttaaggttggagcatgaagagtagatttaatataatatactggattataaatatttacctacctgccacacagctgacaacatctttatgctgccggacgctctgcacaattcttccatcaccaagggaaatgatctgaaaactattctcccaattaccacacagaattaaataattatcaccatgaatttgaactgctgttaggcattgccttccaaaatcaacgttttcggccagggaagtgctaattttacggggagaaattacatcagagccaattccaaagaaaggttcctacaagaataaaacaaattaatgaataaaaactaaatgttatcaaaaaagtactgctatctttgattgtcattaggaagataccagtgatccagaaaacgtgaagtttccaccagactgcaattgtgtagttagccaaagctttactgacagtacaagtccttcgttcatcacaacaatgtttgagtccaacaagctaacaaacaatacaggtgatgaggagctactagagctagggacaacagaagtcactgttatcgattgtggggcaaaatatagtgggtgagcaattggtataggggggcctcttcttgggtgtttcttccggaaaatttgaataggtgtttgtccaaaatttgcaatttggtcctcaatagcagatttctgcaacatatcatccatgttttccaaatcaactgcaccctcgtatgtcaaatagtaaaatatgtttgccgcctggtccaaacaatggctacaccattagtaaggtcatgtagtgtctgcgaggaatgaaaaacttggggggggggggttgggggggggggtgtcggcgctgacaataaaaaaagatttccttttacctcaacagcaggcttgccgcgctgtttataaccaaatatgaggtcaatccagtgatggagattagagcttacatattcactttcaagagcttcgcggttgatatgaatgaattcttctggacaaccctacacaaaagtattgcatactgatatattaccatatgagttataacttttcagctacagatcttagacaatgtattattgaacattttaactgaattgcattagtaaatactacattataaaatatttcttaggactatacttctattacttttacagatacatcaggttaaaatccttgtgctcgaagtttccacttgaatacaatgaaaggtattccccgcaacacacacacacaaagagagagagagagtacaacgagagttaaaaaccagctgatgtaattacgttatgaattgtgataagcataaaatctaccatgatacaatgttatttgaagcaaatggaacacgtttctgaccaaaatttttataactgaagtacaaaaaatttcaaaactatatgaagaccacaggatgcaactcaacagggacataaaccattcttatggatcaaccgtatgctagcagattatgaataaaaactataccggtgctcaatacaggatttttttctgttcctcacccaagaaaaactaataaatatcatgatttaatacatgagcatggatgcttagtacaatcatatgtggaaacagttcgttacctttgcccatggagggagaccaacattgcctaaaggttcaccatcctgctttacaccaaggtgataggaatttgaattttcaagaaactcgggcatataaaagaactcaggtataagctctttgacatcacttgtatttgataagcagttcctatatgtactttcaatgctctgaaaaagacgatctgcgtgatcaaactttccaccctgtacaaacatgtaaaacaacttttaagataacataattttcaagcttgtagaaagacttagaacaaagtaaaaacagtgcaatgtgccaatatatagtgctgagatcgggccagcaaataaagtaaagaaaaacctgcagattgcggtgcagagcagtaaaaggctcaagcctaagaaggtaataaagaacgattcccatgctagagtagtgagatccataataaaaactgcagaaagaaaagagacataagtttgttataaagaaggacgcaagaaaatgtacagtgtatgtttgatcaaagatcaaaccttggtatatcaggatcacagaaattaagatatctttcttcaaaaacctgcatattgaacatcatttattgaacactatcagagggaatgacaataggaagtcacagcaacccatagctcctcatcataccttaaagcgtttggcatccaaggcaccaacgggttttgacaggtcacggaaactggatgacttgttgaaatcaattttctctgacgaatagtcagacaatatccaagggaatataggatattgagttaagtcattgtaagatcgtccagcaagagtgttgagaatcattagatactcaaaattgctcatttctcttcttctccaactttccctagcactctcagccatttcaagggcaacctttctgtcaacaaaagaaataacactgtttttgtctttagtacttcctttggggaacaaagcatcatttctcagggacactaagagagacccaatgtttttagcatcattttgggaggaaaaattaagaaacacaggtgcattggcatcatcaaagaatatctccgttgcagtatattgtagtaggtaccgtgtccaatgaactgcttttatctggcaaacaaggacaaccgggaattaaatttggagtgacacatatcatgtgcttgtggatggttgtgctggtgcatgtgagagtaaatgatagaggacgtaccctgcttattttccaccttctatggtgtttgatgttgtttgatgtatttttcatcagagcatcaccagattcagttgcattgcctcgtcctccgtcaagactacccttcagtttttctgcaccccccaggtcgttcttggggtcagaatctttttcttgatatctgttgaaaacagatgttcctccagtgccctcaaccaaaaattcaaaagaaaaatgcagggctttttgtgtaatagtcaattgtccagcgagttttctctttggggttacaagaacacattgaactgatgacagaatctgggaaaatgagaaaataaggatcccagggaagaagctattaaaaacggtatgtcaattttgcatatacaaaattacagataaagcctacttactgcagcatagtcgtcatctccaccagtagacactggttctttcctattttgaacactagtagaataacctgaagaatctgcagcatcacttgagccctgggtctcagacagggtattctgggaaggctcactcatgtcattgttatcctcgcaaggttcagaactaacatcccctgtaattccacgaactcctttcagaagtaagtgcttcattttttctggaattttggcactaacagaggggttgacagacgaggcattgctttcattactaaatttggatggtggctgacaaaggcgttcatcaaacttatagttacgcttgagtttcagtcgtcgccgccatttatcttctgtcttgtcaagtttccagtacgtcacagtactatttggaaatgggttagcagaccatggtcctctttcctcactcaaagcacgaaaaatatgtatccatttgtcctgatatgcaacataggtcacttcagatgcactgaaaatatatatgtttggtaaaaaaaactctaacagcttactgcaattatttgctgatcctcatcaaatgcaagctggagagctgcttttctactgtcgtccacagaaatggcagcagacttagcaaactgtatgtcatcctcaaagctttgcagttgttctatatcttcaattaagctctcatcaattttggaatgaagttcctggagctgcctcaggcgatcagcctttgcatccttcatgtatttgacctcatcagcagcctgaaaagcaccaaacatattgttcagccgtagtgtcttttgtgcactgttcacaaaacagacccaaaaaataatagccttcagggttcagtagcaaaattttactcctggtaaaataaagaaaagaaatgtggggcacattcaagaatctgtgatatagtaacaatataagaaccatattgtaaacgttttcgaatttttgggaaagcacaaaaggtttgtaatgaaaaacattgacagatacaaaccgcagcaagaacccggtccttctgaacaaaattaagaacataaccagaatccttaagaacataaccagaatccttattgctatttacttcagtggaatcatctcttgccaacatattagtggcaagcagagacttcccttgtacgagaatttcaaaaatcaatggcgacataatatgagaacgggcaccatcatcaagccccccatactgggatctccccctaagtaaagacctgcagaaagaaaagaaaattactaaaacagccaattcacaaacaatgagcaaagtttgcataagtatagccataccaaattaataaatgcagtctatttttgcactgatcatcttctgaaataagattaggaagcaccaatgtgaattgcttaacatacttggataagttttccaagccagctttgcacagatacaaaattataagatggaagatgattcttgggaatctctcgcctcttaacatcatagctttgtcagcattcttgttcgcctttccacttagtgcagaaccaattcctccagttaccactacagcagccatctccgcggccgggatattcagtgattctaccagcccacgtgcccgttgtccaatagatgggacagcagcatttgaaccctttggagtcaatctattttgtcctctgccattcaaattgcaaataagagtccatatcttgtcgtaaaagctccaccaatcatcactcagtttatctccatcagtatatgtactattactccaaggaaagctgcaaaagtgcatatttacatatttgttgatggtaaatacaaattgctcagtaagttataatcttgcatataaccaaaggcaagcaggaaaatataagaaaatagaggctatcatggatgaagacaagctgcttaaactaatactaacatatctgactccaaacggaaacaaaaccaaacaaacttgagaaaagaagttggtgtcaaataatcggtattgaattatctaactaccaacaatatctttccatcagaaagaatactagaatacttaataatgtcaagtgaattagaacacattcctctctcacgcgtattctctctgagcttgttctttctttatgtgcccgtgttacagttgttatgtggcaatatttactgcagtagttactactatattaaccaactcaattacaaaataaaggagctatgacaacagataagacattgttggtatcgtgattaagtttcacacacaattagcatagtacctatgcatcataatggatgacaacaaaccttacctaaaataaaattagtaagttcctaaaatctaaaaattgtacacatggtcacataagatcaattaaccacctaagtatgcacatgtgaagacaatgccattgtccttaaaagaaaatctagcagacaacacacaaatgtctatgtccataaaatcaagaaggtcctaggtgtggtggggtgggtgtatagaactttactagaagtataggcaattctagcacctttaaatattcagaagagttcagtcatgagatgtattaccttgtaagttggccgctaccctcagcatttagtatttcaacaacagaggtgttaatgtcctctattagagagtcatcagatgaagattgtgcagataagccaggtgaaggaaactgttacaaaagagcagaatgagtgaaggcatacataaataaaccatatcttttcttgcttggcacattattcagatcattagcataccaatagtttaattccgatttgatcaacaaacaattcatggataagcttcagaagatacaatatattatcacggcaaggttgcaaaaaaagattttcttcagaagatgtctcaagcaagcttcccacaatgtcttcaaagatgtctcgtatcagacaggaattcggcaactgaccctgtattttggacaatctccataatcacactagggtgggaaaagggcactaaattattaacttgttacagcataaacaaggagattagctttctgacctgctcgattttcaagagaaggaaatttgttgtatcttccagctgatgccagccacctttcatagagcacaagcagtaggtgaggaccaatgaatacatgttcctcacaaggattaactcattggtttcataagtattatcctcagcttctgaacttgatttgtagtccctaaatacatcaagtttcacagatgtctcaagccaagagctccaaccgtactcctgacaaaatcattttattatgaatagataactagtttgtgtagacataagaaaaacggtaactagtaaataccacaagggcttcaacattagaagggtttgaatccagcaaatcaagaagatcactcaagatcttagtccgtgctaacgtgtcttgacaagattgcatatatttaaatatacagaccaaaatctgaggaacagcaaatggagacaagctcgctgaagagatggcactatcttttgacacttcagattgggaacgtttctgtaagacctgaatagaaaatatgatgcaagcatcagatgatccattaatcagttttggttagtatcaagaagcctgatataagaggataaatataagagtactaaatttataaacatgaagttcagcaagttacctgcttaggactggccccaccaagaaggacatcaaagagagtagcacgtaaatgatccgaaagtggaaatttgaaaagtctttcagatattgaatagaagaacagttgaggtgctgctgtcatgcctttccttagattttcagaaatagatctaggccgtcctacaggaaggccaaaaaattttggtccttttttctcagaaggaactccaaccagaagttctccaagaaactgaagtcccaagaggcgaattggctcgaactccctgaaaagcaagtgatttcatacataaatatttttacaaatctaataagaacagaaatactccactctgcatttcagaccgcgactaatatgcacaaacgaagaatgtgagcaaatgaaaacaaaatatggtccagtagacataactcaaatctttcgaaacaattagtcagcgaaattgggacaggtttctatttcaaacagaaaagtgcaaaatgcataacaatggtattacgtgtgataccttactgataagaacaaatagaggacaaaggcaaacatccatagagcagtacaggtgcaatttgatataagaaagtaactatacagtttacaccgtacgtagtataactcaggaaaatactcaaataggaacatggggtcatcttgacctgacccataggcccatgttcatttccatacaatagtctcaaatggaacatcaatttatacccatttcttctttataaaacaaaatatatttgtaacatgcattaaagcccgatggcagcagtgacaacctgacgtgtaaataactgaaagtgcattacctcttaagaagattaatgaagatgtaacagccaccaaggggattcactttctccaagaaagatgataggagtgaattatgtgatagagcacgaataatcatgtgaagtacatcttcaatacatgcaacatcttgacttctctcgaaaaaggacacaagtgtcgttatatcatgttgagaaacctttagcctgcaatagatgattgttgcattacaattaaacaagaaaaagatgagtaaaattgatagcatatgaaacacaagcaaaatactccttgaaaatgaaagcatctatgaatcaacagttggaagtgcttactttatactcatttctgccagactcaataggagcagacggatcttgcgaatttcttctatgtttggcctctctgcaatcacttttttggtaacaggatgcagagaagtcttagaagaccttaaatcagtcttttctgaataaaactggagtacaatgtcaatgatccttgggagcccacacaacattggcaaacatttcccatcgcattcaaaatattgtattagaagcaaataaagttctctctgcacttcatagcttgcatacgcccaaatatgtgggttcagataaatttgtgaaagagcatctttcaatagaacgtctgacatacctgaaaaggcagaaagttagtaatctatactttctaaacatgcagaaagacagatagaaagacagatagctcaccacagttcttcaaaacattaagcatgtacttcaacgacgaaagagtcttaaaatttagcagctgtggtgaaacagattgaaacaagaaccctaatatagagaatccagaaagaagatgcatttgttgctgatttgctacatttccatccaaaacagatgcaacaagctcaacaacttgacctgccaattcatcaccaatggcaggttctctactatgaattacagcatcgtcaaagtggatcagaagagggaaaaatacagagacaccaccaacacaataaattatttcctgcagcaagcgccgggagcataactttgtcccacccatgatagttgcctcaaacttactcttgtcaagaccatcaagtgcagcagatacattgaacaaagttctattgttactagcctggacagaaaaggacaagatattcatttatcttgttcaagaaactaactgaaaaaaaaaacaacactatgcttagagaccaatgtaaacctgtgcattcaagccaaaaatcatcttggatgaaatgccatcctttccatccagaatacccttgtacagagtgtcaacgttcataagcaagttttgatcaccaaggaaagagtacatgtaacttggtcctagattatatatgccttttatttgttccgaagaaagagcatcagaaaatgcatagactgggcccatttgaccaacaaaggcagaagtgctctcaaaaccaagggaagtaggttcttcaccaatgggcatcaaatctgtgccaatactgcagcgagtcattacttcattaacttttgcccacctaaaagcagaaaacgattcaacaaactgtaatcaggaaatcatagagaaaaactaaaacacatggaattaaatcctaatcaaaatatgagttcataagatacccagcgtgcttttttgcaattaagtcatgtttacagataagattcatttgttaggaaaagagaaatgatatttcttgttggagttggtcggtcagagatttgttaggagtcactggctgagatcctacaggtagtctacaatgttactaagttgtagactatcaagttgagtcttgaagacctaatcaggccatgattaattgatttccaagtacaactactcttatatggatggactctcaactttggatgggccaccgtcactaaactctaatggttcatatgctttatgtcccgctccttgtttcattctgtataagatgtatgtgtttggttttgtttgaaattgaaaacattgcatggcatgttcaaacactttttagtcatggttggttgaaacttgagagaagtcgacagatctgttaatttggcaactcaacattatgactcaatcacaatggtgatatatggctttttctttgaaggcaaacaaggaatgggatcaattccctcatccctctcttctctgaatctctcatccttagtcctccaatatctcttaggaatggagcctaagctgcatggggaaaaactggcaaaatgaagtgcaggctcctctcggctattacttcatccataggccgtaactttttttttttgacgattaaacagcaggagaggctcctactgcgctatattaaaaaaaaaagggggaaagtatgtacaaggagagcatatacaaaggaaagagagcaagaaaaagaaacaaaataaaattacaaatcctccaaattagctaaggctttcagaaaactgaacaaggaattgaatagtatcggaaatcctgtagcatgattaaaagtttgaaatagaaaattctgacgaatcacatccggtataccaaacaaatgaagaatctactcacctgcatttttgattagatatctggccaccatcaacatagcatctcagctggcttccagtagagaatgctctccctactgaatgagtaacagaaaggaatatccattgctttgttgggaggcttagaggcgacaaaacacactgatgtttttgactgatagactgcatagggtaaggatagggaggtcaaattaacatatattacttccgtcccaaaataagttcatttttcacccgccacacacataccaatacaaaagcaaaaggatagaatacccctactttataaaatcccaatacaactatccatcactttacccaatacaattattccctacttttacaaacttcgatgcaatgattactctaaaaatgaacttagtttgggacaaatggaagaagctaaaaatgaacttaatatgggacggaggaagtagaaaccaaaatcgaacaaaaaaaatgataaatgaaatcaagtgctgcatccagttcatggcatgtaagcatagctgtgtaaaacgggaacttattaaaaaaagactacaaaattctaattgtctttctattgtccactaaataatgattatcgacagcacatcacctaataataagagcagagcacctaacagtaagggcaaacaggaacgcatggccataatctaataagtttaagaatggtttaacttcaagcattagctgcaagacattgtaagatattaatcagtgaaacttgggacatttcatcaaattgtttgcaattcttaacaaaatttcacatggaaatgtaagtcagtcagtatgttgcattcccaaaattatgttgctagcttcgctagtgccaaataaccatcttgacaaattaatcttttaatcatttgtgctataattttctcattcggttaggtagtacatactccctctgtcccgaaaaaaacgaatctaggattggatgtgacatattctaggataacgaatctggacagagatatgtccagattcgtagtactaggatgtgtcacatccagtactaggttggttttttatgagacggagagagtagtagtcaatgaaaaagaatatttaatgacttgtaagtgttcttttttctgaaaattactaaaatgagctgatggctccaaccaccattacctcaaatattagagcatctttcccaagcatagccaaacatccttttccactttccgtgaaaaaggagaaaagccccatcatgctattctcaaggaaactttccacccttaaccagcagcaaaaggataagcccttattgtaaggccattgaacaggtgattttatttcaatgccctggtaaatggaaaaacaagtaggatatcagataatcaccagataaacatttcctaatggaggaaacaatagaggtacttgtcctgcagagtctatttgagacaatgagaacgactagtgtaaccttgttcctaaaaaaacttgcaacaaaatggaaaatagagaaatgaaatgaaaaacagatcatttaaagagttacaaactcaaaaattatgcccagtcaaaaaaaaatgaaaatagtactaaacatgaaaataaaaactcacagagtcatgaccactaaattcaaagaaagcttcaggtcccttttccttgagcatgtgactaagacttgtcaaaagcaatgaattacgcttctgcttgacaccaatcttctcatcacgcaggagggcaaacatttttcgtatatctttcccgcaaatactgtgcccaccaataatctgaatcaactcggcaatttttatgacagtatcatcagtttcctctactgaaaaccaatcaagaagaaaactaagaaatcctgctttgaaacaagaacttctatttgtaatggatcccttgagcaactgttgtaggaccacaagcccataatgctggagtgcagtgctgctctgccaattagaaatcgccaatgttgcgtatcaccaaaacatggatgtccaaccacaaatatgtgcacacatcacagggagtgcgaccaagagagagacgtaccttttgtaaaacatttaaaaatagtatgatcacatcttcattctgagagaaaaaaaagaaaggtaacatcagataacagaaccaaatagaaatgtgggtacaatagagtgaatcacttgattaagcaagaatagcattgcttcaaagatcatgaagattacttgcctttattgtggtttcttcgtttttatcaaatgtcccatcaacaagcatgccaagtatggcatccaagagtttctgactaggtaaccatttacagaagtccaacagcaagctttgcagtgtttgataacccacgccaaccagcattctaaaggaagcctggataagaaaagacagagttttagatgcacataaaaaaaagatgatcagaggagaaacgaatataaagtccaaataatgcttgccagaaatccaggtgacagacaggacggcaaatccagaaacaaatgatactttggttctatattttcgcaatgaaaagagcatacaactactggaaaacaattctgatatttaacttgctagatgctctggtttcacaagaatatgcaggttccacaacaaatgtgaccttggagattgagttgaaaaccctaaacgggagtgaacaaagaaacagcagtactaatggttacatctcgaaatgactcaaaaccaatactggcagcagtctaatggttccaaaaaaattttctcagacacggaggagagctgcctatcattatattaagaagaagaaaggagagggtaataacccttacaacacacacataaaccttacatgagacaaaaagaccaaaacacacacataaaccttaatggttccaaaatagtacaaaatgtaaaagtgtagagaaatatttgattacctttgacacatcattttcagcaagtaatacagtcaacgtctgaaggacattaaggactaattgttcaccaactgcttcatcaaaagtcccattcagtaaggatacaatatgcaggaagcactccccattgcggaacagattttgataatactagaaaaaggtatgagtgaaaagatgcatttgtcagggatgatgtgatattaatgaaaaggacaaaagaacattatttaatgggaataatcccatcttacaaaaagaataccatgcgatctatcataatgatctctctcatgttaactaatagatcaatagacaattctgcgaagtcctccttttcttttgcacgagtgaaagcctccaaatattttgaacatagctgcaactttgctgtatgatcttgtgctgatgctgaaggtaactgattgtgagaaaaggagatagttttagttccaaagaaatcatatcacaagcaacagaaggagagacaaggagcacggcaataccctaaataagtcaagaacttgctccaatacattttttcggaggttttcttcttggaataaatcaaataaacactcaatacaattggcattatgtaaaactagaatctttccaagctcagatattgtggtgtattccttgaaaagattgaaagccaattccacacatgcaatagtacttttaatcttctcatctgaagaagacatctgaacattttctgattgaaaaacatttccacttaagccatctccgggatgggaaagcttccttagatgttgtgcttgaagacatgcaaccttcaggactctggtaagcgcgtccaatgatttaaaggaggatatagtctgttcagtggcaagttgcaggataacatgaaaactcttaagaatagttccagctaatccaggatcataagtgcaacgttcaagcacatctaataacgctgagcactctggctacaaacaaaagtaaattattttaataaggtgaataaaaatagaatggcaaaattcaaattatgaacaatgcgcaacatcttaggtgacgcagcagaaatttaggataccagattgtttgtgttctcatttattgttgcggcaaactccaagaaggaaatagcttctgcttgaagaatgttgacatcagcttgattaaggcctttagaaccagctgattcagtagcatcaataaaatgattgttttgtgtgtcacaaacaatatgatgaatatactccatagatgatccaaagtaaaaaaatttatctgaaaatatcagactccataaaccctcagcgcgaaaagatttgagcagagctggtactgaaatgagaaccttcctgaatgtgcaaagaatataatgctgtagggtatttgccaaaatcctggagaatttagtcaatacaaacaaaaaaagtcagcaaaagaaatttagaaatgaatgatggcattaaaatacataaacatgcaattacttgaaaaaaattacaaaacatgatacttccacacacagattcattgcactcatgaaacaagacggtagccttgcaatcatcaaattaacaaattgtacatgattagatagatattaggatcaacaccattttagacaattgttcacatgttgtatctagcagaatattttaattatcatccattgagttttgcagtactggctatacatcggaaagactaatatattatatgaagtcccctgtaccatctagatattcaggaaacattgaaagcaaagtccacaatcaattcatctagtctaatcaagaaagatggacagcaacattaaggaaatgagaacctaccttatatggttgggcaattcagattcactagcacaagctttgatgcatggaaaaactgttgaaagaacctttataatccatcttgcacattgctcacagtatgccactgagatggacagagaaacttggctatcaactgcaccagaagagttccttatctcgttaggaggaagaagaaaagaacaaagtgctatgctcagctttacagaatactcagtccattcagttgtatcaagaatatcaataggacttgcaaaagattctgatgtaagcgatatcccagtgctttcttcaagcttacagttctgcactcgagagtcaagtgccttttgttgatgaaacccctgaagcataaatgcaggccaacagatgctgtttgcaaacttatgtatccgtccattttcacataagaactgtaaattgttgacattaccaaaactgaataggaagtcaaggatccatagagccaaactatgcaatagcatatggagtctaacttaaacagactattaaattctggataagtaggtattagtgatatattcatttatttgcagccagaatattcaaggtgcaagagtatatcatcgctccaagaagacagaatccagaaaaaaatgtccagtcatgtatataggtgtgttatagacatgaaacagttaaagtccacctgtaacaactagtttgtacttaatatattgttaataaattatgaaagctaaaaatattttttatggtttcagaatacatcgtatattcaattaatgttcagaggtatttctagtcttttttagaaaaaatggatactgcaagaatccagaaataagacgtttcattgactgagagtaacaaaggtgtacaggaaaattcatgcattctcttactaaaaaatatatgtgcatcaggatacactgcctccctcagaatttccagcgataatatctggagctgtagaattccactcctgtgtaagacatgttatggtcaaatcacacaaattatatatagaaagcacacaaacctcctgcattcctgcacctaaggtttagtattgccacagttgaagcacttacctttcatcactggggacaaaagaatactttgagactgacaatttgcttgatggtaatcccagtccatctaatagaacctccagtcctccaatgcttctgaaatgattctgtgcacgtgcatgttgagagattgttgatctcagagcatgcaaagttataaagtgaagtagcacgtcagtccactgctctttcaaattcaatcttcggatgacccttaagagttctgcaagaacaattccagatcagtaagataataacagtgcaaaacatgaactaaccaatttaacatcataaatcctgaagaattaattgtgttatttttctccttttgcaataccacaggatgcataaagaactaaactatatctagacaagtacaattttggagaatgctatgacaatccatgtcttatgtttcttaggctgtgttctttccccctctttcccaactcacctctctcattttccacgcacacgcttcccaaactactagacgatatgttttttgtaaaagtttttatagaaaagtttctttaaaaaatcatatcgatccattttttaaaaatattagcaaagttataaagtgcttcaacactccaaaagctttggtgtctcgcatgggcttctgcactccaaaagcttctcagtggatcagcaaactcgggcagctagcacttcccagtgtgggctgggttgtgtgcgtgtgtgtctcggtgggagggccttggtctctcctttgttttcttctccttaatgaaatgaaacgcagttctcttgcgttttcgagaaaaaaaaattagctaatactacctccgtcccaaaatgtagctaatttctacagtaacttgtcccaaaatgaagctatttctccacctaccctctcctctcaaccaatcacaaccatgctcttcaccaactttctcttctccaccaatcacaacccttctccaatcatctctacctactttcttaatatccgtgtctaccaatgcttacattctgggacagaggaagtactcaattaaccatgcgctaatgagtcgctccattttgcgtgcatgggagattagctcccaacaccatctaaagaacacagccttagtggagggagcataaatccaacacaggaatgatacaaaataaaatgtgttttgtctcatcaccctgaatcgtgcaaaacatttttattgccatcatgaaaattcagttactgaaagttttgctctatttaaaaaatagcaaggtagcatgaataaatataactatatatgtggagtatttactaagcatttgactccataaatgaaagtaaatataactatatatgtggagtatttactaagcatttgactccataaattatatttcattcatttgatttgagactgcgcaaaaataatttactgcagcaaagattatgcagcgtaatcatctagcttcagcatacttgttccatttcttattactggcactcttaaccaaatcatgcacactaacttagaaaggaagcaatggtttgaaggttggaccaaaataataccataagcacaaacagtatgtataaaatgtaaagtagaagatggtggatgaagtttgcaagtgtaaatttggaataacatctcaggacttttaaaggtccaagtagttggggataatatattggtaaaaatgcagagctgtttctctacattcagtgctggaccacaagctagcaagattccttccaaaaacacatcacactaatgcatcagcaaggtttacgccctctcttatcacccttttggccccaaattacattgagcatgccaggatcattcatctcatgtcgtaatctcttccactctttggtttcagaccagaacatacaggtcattgtcaacttgtctctgaatctagaaccaaactatttgtgtaaactggagttatggagtatggatcatgcttactataagagtttatcaataagctagttagcattacagattaagttcaattgtcctaagcaagtgtcaaaaaagaacaatgttatcagatgtatacaaacattgagaaaacaatcctacctactaaccaattgacgcctccagcttccataactgcaacaatggccttttgctgccagttggtatcatgaacagcgctttttgcagatattggagtaactgtggccaaaaactcatttgatagggttttcccagtagtattgacaaattgcgttaacctagtagcagttggctccaagttcatgaagtttgaaattattgtaacaatgtgtacaagtatcttttgcatcatcttcatgttatctatggctttgtttgacagctgttcatctgcggcaagcaaactggtcaaagtcttgagctttacaactgcagctgaatacacaagagaaaaaacgtcagttaagaatagattcatcacaaaagaaaccataccagtattaccacggacatcacaacctaagctacaacagtgaaaatggtatgaaacaaaaaaggggaaatgagcgaaattacttctagaaaggtaaaacactactaaagaaagtattgtacctttcagaagagcagtgaccttctgcacacctccataataactaaatactctacagttatgcactgagcgagtaacaatggtcaagcattccaaaatattcaatccctcagagcttaacatcaggtctgacgattgttctgaaatgttaggagaggattccgaacagctgctgcctactaatacgagaaaaacaagtcatatatcaattattgctggctcactctagttgcaatactttacaaccactgaacaaatcaactactatcatgcatagcctgattgctcatttttcctttagcaggtactatgaatctatgatcttgctttccgagaagacatgtaactgattttacatcagtgtaaatttaaaactgtcatagcatttagatatgacttctgcaattttgataagtcaaatctggcaaaagcatgtttcaaatctttcgtatgcaaagcacctcttcaagcagatgtttcgaatctttcagtatgcaaagctgttatgactgacatattaatggcatcttaaaatgatatggaattaatggtggggtgcaaactacaaaagttgtatgctatgatatataaaaagcagaaatgaaaccatgaaaaggagggaatgcatcatcaagaaaggcatcatggtgttcatcagatccacttactctcagtaatgaaagaagttatttgagaaacctcctgcacaagaataaggatgatctcagaaggatgccctctggagcatcctaaaaccgtatcatctgatattggttcttgatcaactgattgctccgtgtattgcggttcccactctttgaatgcttgtacgaaatgcatgataaatatttgcaaggattccttcttttcagcctatggaattgttggcaacagaaatgaggaagcatgatcacaaacttttggggaaaaaagtacagtttatgccataaaaaatactacagaatgaaataatgccatactacagcataaaaatgtgacattgtttccttaaactaagctatatgtagtctaaattagtcgatacattcataatcttggtcatcgtatctcatagacaggagcgttgatgaggaaactagtcaaagtaatcaatcaaatcattcctcaacttcaacaaagccatctcataagtcataagtaaaaagtgtaaaacaaatatctgttattggcatatcatgtcatgcaaaaatcaggaaattatgttgtaatgttaatgcacatgtgcttgatacaagctgtttttgacatcatgatcaaaggaaatagccgaagaaaaggttggtggcaaaccagcatgcaagattactcaccttgtcaatggcattctcatatttctgccaaagcatgtttaagactccttcaacaccactatcactggaagcagatataaacattgttagaacttacaagagaatcagccttagcagattgtcccctaacaactataaaaactgatgttacatttgattaagatgtaatgttaacatgattgacaaataagtatctacagaacttagttgcctatcaacattataaaatcatcatttactcttttttaacaaaaaaaatcagtatattaagtgcaaaaccagggtaatcaactctagtacctaattttggcacagattttgtgtgtctatagtggaatatcacacacgagctacttatactgttcagtgatgtaactatgcgtatgcggactactgaaatggaaaaggataactaaaacaaccaacgtaccaacaacatacctcttatcaattatccgagttaacagttagcgtgcacagttacttaaccaaataagcagcaaaatctaccgcacggaagcaagcttgagaatgcagcattggttcgtactcggtatccagtagagcgcacgcaccaacacattgagctacacaagcaagtcgcattccgcagagcgagcggtttcctgaggatttgagtcggctaggttacctgaagcggaccctgggggacggcgcggcggggagcctgtcgggagcggaggaggaggagccaccggcgccggcgccgccgccgccgccgccgtcgccgccccctccacccccgccgccgccgccgccaacccccgacgaggccgccgccgacttgcggaggagatcggcgacgcccttcacgatgttcatcgcccccgatccgaggcggctagcagcagcgcatcaccgcgcggcggcgggcgccccccgcgggggaaggcgacgaggccaccacggggattcgattcgaatccaatccccctctcctcgcgggcggtgacgcaggtggtggggagggggagggggaaggggagatcgcgtgaggaaggggagcaccggaattttggaaatgctcgtggttttcagcgtgtgggaggcgtgagagcgtgagcgcgacgaggagactagggagagggatctagaatttctctgggggagaagtcaatgggaattgcgatgttggtgctggcttttgtgtcctctggtgcgcggagtcctgcagcggcacacataatacgaatactagcgctacgtggtactattacacttagtagaatggatgaaggttcttatggaaattaaccaacttgaatatcaatagcagtggtaaagatgtagtataacagtatatagcatacctgtagcagataatatttcatacaagcggatagtctttttaatagttctttaataaatatagaatattggacaacaattcatgtccgatcgatccatacatgtaataaatataaagttgagagatgatttctagagttttagaaacaaaatgtgagtactcttaacacttctcaggtaacacaatactcaacacatctggtgtaaaaactctccgtagtcatagttgaggacctccgacacactctttgtcttcctggcgagatagaacactgagtaggatatggcggcactcatgaccatgtgactcttgctcttgaagaacctctccgtgcgaacgaaactccgaccatccgctgggttgttgatatggtcaattaccttgaaagtcgccgcaacttcttgtaacccgggaaccagtcccaaagactccactagaacgctctttcccgaagtgttcaacgtcttcttctccccttcaagctttatacctcttctgatcatggatttgataacagagacgtcttgacgaattcttgagatgtttgatgccatcttattctccacatggcgaggacttgccatggtgcccctggtaagaaaaaccttatatgaagcaattaattaatattatatgtttaaacggtagttaaatggtgcccctaactatatgtttaaaaagaccttatatgttacataaagccatgaagtattcaagacaaaggagaatatgagactaaaaactttcacaggcaaagcttgaatcagaacacacaagtcatgaagactacaggaggaacaaaagtttattgtatagattgcaaaaaacaatggaatccttaagtttaaatagctgcatttgtattgacatttatgtaatgatttcaagctgactacacggtactttgtagctagcctaacaggtaatacaccctgtagataatacgattgcaaaacatcttttatttatacgatgtgcaattatattctctagcaaggaccctacagatcgagctgttccaaccagaaatgatttgttattctaatagagaagacgagaattagtctactgctacctctttaaaaaaagatcaatcacgtaaaattaatgttactatcattaaacaaactatcataatatgtatttctttttatttaaaatatattatttttatagatattgttggttaaaatagtatttcgaagattatatcgaagatcaaaaaatacttatattttgtaaggggagtattgcattacagatctactccctttgtcttaaaaaaactatttctatatttgaatctggatatgttcagatttaaatgtagaaatgttttttttcttttttttaacggtgggagtacttagcataggagaggtaaacaaacaaaactactgtagtacagtaatacacagagggcggcatcagtgttatttctggattaggcgattagcaccagctttgaagcaaaaaggcaaaaattttaccgcatcaaattaaagcacggtcacacagacctcaccatcagacctccacgacgaagccaaactgattgatatatagaagcttccataaagaaaagaggaaaaaaagcgaaccttctagaatccactagaaggcgatcgaattactacccagcacacaaattggcagtctccgcacgaatccccgcgcgcgcgcacgaaacacaacatgtatatgtaatgagaataaacaggagaaataaccagctaattaaggagaaacatatataaggttgcagcacatcgaatcgtaacgagatcacaccgcttggaacatgatcagaggctcacgaaagtcccaaccttttgaagcgactcccctccaggaaaagcatcccgatcacattccagaaccttctacccgctagctttcacgccatgcgctggtgtcgcaaaatcacagcttaagcccccccaaaaccccaagaacactcccccctacccccaccccaccccaccccaccccacccaaagaaagaaagaaagaaagaaagaaaaacagcaagcacgacatgcaagaagccgaactctggtgtggatccgagctgcggatgagtattttggggcaggtgagggagatcggaggacggaaaccctaacctttgcttcgaactcgaacaaaccaatacggggaagagacgcggcgccgaggcggagtggttggggagggaaggggagaaaacgaaagaaaggtgatgctgaggtgcgcttgctactgcgctgcggtgctcatatgcgagatgcctctgccacttatcgggttaacgggtcgtatatggtaatatccatcaccctcagagtatctgcttgatccccttaaaaagaattctcagttcatatcaatattacatcctttccccgttttaagtgaagttgtgtatttccgtctctaacatttgatcgtttgtcttatttaaaaaaattaaaaaagttagccgcacataaagtatttattattcatattttatcatgtgcaggctcatcctgctaacttggtgtgccgctggcaggacagcagatccacaacacttataattactagaaaataagcacgctcgttggcacgttattttcatagcccgtgtgtagtcttaatgttgaaattttaccgaaccatatcagagtcgatgtgactctaatgttataaaatttgattattaaaggtatagttggtcaaaattagcaccttaaagtaaaaaatgtttttttatcaagataaggagtattattaatggtatattatatttacatgtgttttatgatagtttaaaatatacatttctcaatacctattttttagaaaaaataattttagttcatttgtttgtgttctcaaataattatcacgaactcagtttcatttatcatccattagctatatatgtgttcatagttttctttttttcttcgcaacataaataaatctggtctcttctttgggatataatgcgtgcactaaattattacaatcgcaacatacagttattttcatgccctttctaaaaaaatattacccccatcctaaaataagtgcagccatggatatccgtacctaatgtttgaccatccgtcttatttgaaaattttaaaaatatttagtcatacataaagtactattcatgttttatcatctaatagcaatgaaaatactaataaaaaaattttcaaataagacgaacggtgaaacattgaccgtgaatagtgcaaaactgtacttattttgggacggagggagtatattttcatgcctccccccaacattgaaaaaaaactattatcgtatatataaattttattcgatgttcttcaacaattgtacatatataagttaaattttcaatgagcagctcacataagctagcttaatagctacgatacgttgtactcccttcgtttaaatatttggcgccgttgactttttaaaatatgtttaaccgttcatcttattaaaaacttttgtgaaatatataaaactatatgtatacataaaagtatatttaacaatgaatcaaatgataggaaaacaaattaataattacttaaatttttttaataatacgaacggtactctgttaatggacggtactcagttctgtccatcagaattaatcttttgagtaactctgtttcaaaaagatgacgcacaccgtgagcaaccacaaccaggcacttatccatcattaggactgtttttttcgaacgattctccccagaaacaacgcaaagtatagagcatgaaaaaaaattacaactctgggagatcgtaaacaggaaaagaagaaaaaatagcaccgcccacacaccgatagctctagcttacaaacccgggagaaggctagcatcgtaccgaccgctgctaagccaacaaaggaattcaagtgagatcgtctaaaatccaatcctaacaactgacaccaaactctactctagccacatcttcgagattgagggagagagtgagagagaagaatggaatggctctccacccaggccctctgacgtggccatcttgcataagctacggcgccgacacaagaggacataagtctaaagtgagcttgcaccggttgtttgtgaggttttgataaagggcctaccaagatgacgtctctagggagaggagcgaaagaagcaccgccgccgccgttcgtcaaggtctcaaagagaaacgagactgggttttcaccctacacccgctagaagagatgggacgacacgacaacaccctaaagaggagaagtgacacccgaaaagccgtcgttgccggcctaaccaaaacggtgctaggttttcacccgtcgcccaccgcctgcctatccatagcagatacacctttgctccatcatcgtctaaacctctgtcggcgtccctcgcatgccaccacatgggcaccctcatcgtgcgctccacgccgactgctccacgccggcctccagcatgtcgcgttgcgccagcttaccgccaccgccagctatgtgttctcatgttgtgtcggcctcacgccacctccacgcagcactcgccggccacgagcctccaccaagcgctgatggcgccatcactgccagccgccggcaccgcccttccactgacgtcggtgtcgtccatgcacagtagcctgctccaccacacccccattgccggccgccagcgtcaccgcgctggcctcccgccgtgtcgctccgctccgtccactagctcttgccgcaccacacgtcgtcgccgcccacgccggctgctccccgcccagatccgtagggtgttgggtctggctacgctgcctaggaggggggatccggtcggggcagtgccggatccactgccccataccggagaagccgccacctcccacccgacgcgctctgctccgcctcccacatcaaggaggagcttcgccggctcggtttcccttgccaccaccttctcagtcgggctcgcggtttctagcggcagcaaggcgtcgagataggtggagagggtggcggcgcgagcagctaggatttcatccccaagctacccgcatgagagtgacgaggggtttgttagattgatatttttaggacactgcgaaccttgaacaggcaccacatggcaattcttttacccactccctgagaacgcaaaaagctcacctagaaaacacagatacagtacagatgttcgctattaccaaagatcgttactaattttgacacgaggaatcttgggggataaaatctatataccctaactctcttctcaagcatataaacgatttcaagtatatcggctttgattcaccaataaattctcgctgctttatatataaaatgtatttggtacatcataagtttgacgtagatagataaaagagttgaggtaattggttcaaagtaacacaaagataaaattattggattcaaaatgagtccaaagcgaaacaccgataataaaagatagccaaaagtaaaactttataaattttaaattctgtaaaatacttattcatatcatggttgcgtattttcactcttgctgcaacgatctttgcttgcaagggaaaagagacagcaaatgcgcctctgcctcgattcgatcgtatgcctgtttgccaagaggacgtcaaggcggggtgttgacgggatggaacaacgaactagcattgccaacgtacgaagaaacaagtccagctgtcatttcaatggctgaaccaggtgctcgtaataaccaaatgctgataagctgatgtcctgatgggttagtaacaattagtctttttttttttgctcggtgttctaaaaaaacaatcattcacgattaggacaaattattaaaaaaatcgcacgagttatactacctatgtggccctgttaagaaatataaggcgcagtttgactatttagttttaagctttgatcaataatttgtataacaatatttaggttttgttggattattcatgttcgaaagtactttctactccctccgtttcacgatgtaagtcattctagtatatctagattcattaatatcaatataaatgtgaaaaatagatgtgaaaaatagagaatgacttacattgtgaaacggagaaattatataactaagaattcgtaactgtaagagaaatttgtttttggcagtcaaatacgccttatatttctgggcggaggtaaggagatcagtacttatttacgtgcacgcctaattaagcaaactgcttagcggttaagttggggcaatatgtgcccgttaggggagtgaacccgttggtgcaacacgtacgtgcattgccgttttggctgcatgcgttaggtcgtgggccctacgaccatgcatgcatggctagctctgtgcttcaaatttaaaaatgctctcgatgcatatatggctgtgtttaggtagcttcgaacttccaacttttccatcacattaaatatttaaacacatacataaaacattaaatgtggataaaaaaacaattatacagtttgtatgtaaattacgagacaaattttttgagcctaattataccatgatttgacaatgtagtgctacaataaacatttactaatgatgtattaattagacttaatagattcgtctcgcagtttaacagacggaatctgtaatttgttttattattagtctacatttaatactttaaatatgtgtccgtatatatgaaaaaagttttaccaaaacaactaaacacggtctatatatacgttttctatcggatgaacaatatatttttgttcatttgggtgtggatgcgtggccgggtacactggactaaatgataaatgctgggtatacccttaagggatgagaatgaatcgaaactttttgtaataatatataatcatattcagttccatagttcgtctttacattttcgacaaggttgatattaattaaacaatttaaactttaacaataccaataacttttaaagcatttagtttgaaaacattagaacaaacataatgtgtatagattattcttaaacatattttaataaaattaaatgttcaattatatattaatatgaaccatagccaaaaataagtttcgaagaccgtgttgttatccaaaacgttaattaagaaatggaaccatagagtatcatagagtatactgaagaatattgttttatgtagattttgttggaattaatgaatgggccttagcccactcgaagattaattctttggaaaatcacaaaagcccacctcatgggatggcatgcatgtggagtttagtaccaccttgcttatttaggagagggggacctccttaaaaggggttgatagcgtctcttgatgttgaggagaaagctcgggaaaaagatgccgcgtctaagggcgatggtgggcagtccagtgccaatgttgtgcacaagacccagaacaagagcaaggggaaatacaaagctcagcagaccaccaacttcaagaagaagaagaagaacaacaacaatcctaatcaggatgagaggacttgctttgtgtgtggccaagttggtcatctggctaggaagtgtccacaacgcaaggggatgaaggcacctgcagggcagacttctaagtctgctaatgtgaccattggcaacactggagatggaagcgggtatggtaatttacctactgttttttcagttaatcaatctactaattggtgggttgatactgggaccaatgtacatgtttgtgctgacatctcattgttttcttcttatcaggtcgcacggggttccaccgtcctaatggggaatgggtcacatgcttctgttcatggtgttggcatggtagatctgaagtttacttcgggaaagatcgtgcagctgaagaacgtgcagcatgtcccttctatcgacaggaatcttgttagtggctcccgtctgactagagacggatttaagttggtttttgagtctaataaagtagtcgtgtctaaacatggatattttattggtaaaggttatgagtgcggaggcctgttccgcttttccctttctgatttctgcaataagtctgtgaaccatatttgtggcagtgtggatgatgaggctaatgtttggcattcacgtttatgtcatattaattttggcttgatgtctcggctttccagcatgtgtttaattcctaagctttccattgtcaaaggttctaagtgccatagttgtgtgcaatcgaagcaacctcgcaagcctcacaaggctgccgaggagagaaacttggcaccactagaactcctacattcagatctttgtgaaatgaatggggtgttgacgaagggtggaaaacgatatttcatgacattgattgatgatgctactagattttgctatgtgtacttgttgaaaacgaaagacgaggctctagactattttaaaatttataaggcagaagttgaaaatcaacttgacagaaagataaaaaggcttaggtctgatcgtggtggagagtttttctcgaacgagtttgacttattctgtgaggaacatggcatcatacatgagaggacgcctccctattctctcgagtctaatgggattgctgaaaggaagaaccgcacactgactgacttggtgaatgccatgttggacaccgcgggactgcctaaggcatggtggggggaggcattgttgacctcaaatcatgtgttaaacagagttcctaacagaaataaggacaaaacaccatatgagatatggattggtagaaaactatcactttcttatttgcgcacatgggggtgcttggcgaaagtcaatgtaccaataacgaagaagcgtaaacttggacctaagactgtggactgtgtttttctgggatatgctcatcatagcattgcctatagatttttaatagttaaatctgaggtaccggacatgcatgttggtacaattatggagtctcgtgatgctaccttctttgagagctttttcccaatgaaggatacacatagtggttcgaaccaaccctctgaaataattctcagttcaatcacaccaccagaacaaactgaacatacacatgaacttgtctctgaggaggatgtcagtgaagctcctcgaaggagtaagagacaaaggatggctaagtcttttggtgatgatttcactgtgtacctcgtggatgacactcctaagtcaatttcagaagcatatgcatctcctgatgcagactactggaaggaggctgtccgtagtgaaatggattccattatcgctaacgggacttgggaggtgacagagcgaccctatgggtgtaaacctgtggggtgcaagtgggtgttcaagaagaagcttaggcctgacggtactattgaaaagtacaaggctcggcttgttgctaagggctatactcagaaagaaggcgaagatttctttgatacttactcacctgttgctagattgaccacaattcgtgtgctactttccctagcagcctcacatggtcttctcgttcatcaaatggacgttaagacagcttttcttaatggagagctggatgaggagatctatatgtatcaacctgatgggtttgtagttgaaggtcaagaaggcaaagtgtgcaaattgttgaagtctttgtatggtctgaaacaagctcctaagcaatggcatgagaaatttgacaaaacattgacatctgcaggctttgcagtcaatgaggcagataaatgtgtgtactatcgccatggtgggggtgagggagttattttgtgcttgtatgttgacgacatactgatatttgggacaaaccttgaggtgataaatgaggttaaatcattcttgtctcaaaattttgatatgaaggatttgggagtagctgatgttatcttaaacattaagctaattagaggtgagaatgggattacactcttgcagtcccattatgtggagaagatcttgaatcgttttggctacattgatagtaagccttttccaacaccttatgatcctagcttgttgcttcgcaagaacaagagaattgctaggaatcaactggaatactcccaaatcattggctcgttgatgtacctggctagtgcaactaggcctgatatctcctttgctgtgagcaagttgagccgatttacctctaatccgggagatgatcactggcgtgcgcttgagcgagtaatgcgctatctgaaaggtactgtggaattggggcttcactatactgggtatcctacggtactggagggttatagtgattctaactggatctctgatgtggatgagatcaaagccactagtggatatgttttcacactgggtggtggtgctgtttcatggaggtcttgcaaacagaccattttgacgaggtcaaccatggaagcagagctaacggcactggatactgctactgttgaggcagaatggctgcgtgatctattaatggatctgcctgttgttgaaaaaccggtgccggctatccttatgaactgtgacaatcaaacggtaattgtcaaagtgaatagttctaaggataatatgaaatcgtctagacatgtgaaaagacgattgaagtctgtcaggaaattaagaaactccggagttataacgttggattacatccaaacagcgagaaacctggcagatcccttcacgaagggactatcacgaaatgtgatagacaatgcatcgaaggagatgggtttgagacccatgtgagttatactatggtggtaacccagtctatgtgatcggagatcccgtgaattagatcctgggaagaacaaactattaataaactagaggagagtaccaatatatataccctctccaagtgaagatgcatatactctcgtgagctgcaaggcaggttggctatgccttaatgagttctgttggctttaattagcgaagatgttgtcctgcagagcattcttgaaagaactcacctttgtgagcttgactgttggtcgcagtctatgaagattttgggtgaatcttctaggaagcttactaaagacctaggagtatgacttatacgctccacccgaggggtagtctacagacggtctagtaccagataagactttgagtgaaacttgcttgcacaagacttgcaattcaaggcgtagtccattgttcaagttgtgagtaagtgtaacttggagtcctaggtggatgttcaaccttaattggtctccatcgaaccgctggtatataaacagtatattggaaaaggcaaatctcagtgggattttgagatttggtgggggattgttggaattaatgaatgggccttagcccactcgaagattaattctttggaaaatcacaaaagcccacctcatgggatggcatgcatatggagtttagtaccaccttgcttattctaggagagggggacctccttaaaagggaggatgccctcctagccacttgaagcatgtgtggtggagagaagaggggaaacacacgcgcgcgctcgctcgcctcgcctcgccgggcggcccggcccggcagggcagggcagggcaggcagcgcgcgtgcacgacgtacgcgtcgaatggtccgaaaaattggctcctcacccttgcgcagatgcagcctccttttgcagttttgttttgctgcaaattcggattcgtttttgttttggaaacgttccgaaaaaaccggtgcgtgcaaacggcgtggagtccggataagttacgcgcgacttatccggttcggttacgcgcagtagagatcgtgcgggcgccctgatcaagcgacccttctctatataaaccgacctgccgtcttcacgcaacatacgcgaaatcaatctagggtttgcctcctactctgtactgcgccgtcgctcgtagactactccatcccgctcgccggcgtgcaccggcgatcgggagagcaggtctccggaacctctgccttcgacgtcctgcaccgggagaaggcggcaataaggtttttgggaagcgcttcgcgcgactgctccctgtttgttcgcgacagctcgccttcctcttcgctcgcgtgtttcgtgccttcgtagacacctgcgaaaagtttcgaccaagcagccggtctttccgtcacctcggtacgtgttcaatatgttgcgcatatttgatctgttcatgttatactgtgtagtttacatgtatagatctaatgatgcgttcatgctagttttcatctgtaatgtcatgatttatttatggaatagattaaatcattatatgtctataatctcaacagattttgggttggttgaacgaataattagtcgataggtgtggcgcgtgtggagagaagctagggggtagggccacaccctaatctcccttttaaatcctattaaaatgcaatgaaattggaaacataaagcaaaatccattagttgaaatgtagagttggggaaattcatggtctggttactcttcagattcaccgtatatataattaccccctccatttctaaataaattgttttgacattcttattttttaaaaagagataatccaaaaaaatgccattgacaagcgtccaaatcccagaaatgacatcgacaagcgtgagtttcaagaaatgccatcgtacaaacgactttgtcccaaaaataccattgccgttagggttccatccattccgcgccgttaagttctataggatgaacagtgtatttaacggcgcaaaatggacggaaccctaacagtgatggcatttttgggacaaaatcgtttgtacgatggcatttcttagaactcatacttgtcgatggcatttctgggatttggacgcttgtcaatggtatttcttggattatctcttttaaaaaactagcttaaatgactgtgctttgctacatataaaaaggaaaaatatcctaatattttctaaattaaataaaccgtattttccacgaaatatgtcattgtccaaattaatttatatgtggctatccatttagatataattgttacgtaatattaggaagtttaaaaggtaacatggaaaaattaagagagaatcccttatataccactccaaattaaccggttcccttatatgccacttcaaattggcttctcccttctatgccaccggttcaagtttgttatcccttttatgacattgccgtcactccaccgctagttgacatttaacttcatagtaaaaagacgcatttgcccttaagagttggtatacaaccaataataaatatactaatgtagctactggatacaacatatgaaaaatgattttttttcatcgcatgcaattttagccatcaccatcacaaataaattttcaataaaagcatgaaacatgcagttttccaacaatatttttaatacaaagagcattttccactagttctgacaaaattttgttcactcaaaaaggattaaaaataaattagttatgatgttttgaagtttacacattttttacttgagagggtatattggtcatttacgaaaaagtaacgtttaactaacagtcaactaacactatagtgctgggagtagcataaaatggtggaaaaacttaaaccagtggcatacaagggagaagccaattttaagtggcatataagagaactggccaatttctagtggcatataagggattctcccaaaaattaaaacaggagtaaatatcttaatttcctggaagcgcacaacatccatcctgccgagaggcacacagccgagcacgggcgctccagcaacaagctggtggtctcttgcgggcaggaacccggcctccatcttcgtgtagcctcatcgacgtgcgtagccacacatcatatagtgttccacacatgccgagctgatcgctcgagtcggagccacgataaactagcgccgacctccggccacactatagccgccgggccaggtgcccaagttggctcgatgaccacgtgtgcgggccgggacttggcgccacggactccggtaccgtggtgttggacgtcggtgccaaacaactctagtgccgcgatagagtctaaatctaaaacatgtgttttagaggatttatttataaaaaatgtttctgaaaggacttaatgtgaaaaattaaggcctaaaaacctggctatatgaaaaaaacaacaaagtacggggctctcgcgtcgtcctcatgagggtggcttgggggcaacccttagcggcccacgccaccacttcctcaccccatctaaccgcctcgccgtcgctggaaaccgcacgggcggccagagtgttcggtgggacggatccggtcacgccggaggcagatcccctcaccccccctccccacgtggccatatcgggagtaggtgactccgacaagtggaggagcccatggctgcgcaacccggtagaggcgtggggcagtgcggtctggtggatgcacggggtggcgtgacggctgtactggctgatggtggaggaggccaaacgtcgttgccgggagaaggcagtggtaggcccgcgccgtgaggaggcgcggccggtggcagcgaaggccggcacagaaggggggcaaagccagcggaggcgaaggtagacgaggtgtggcggccggtagcggaggccggcactgcgcgatgagggtggtggcacgtggagactggccggcgaggggcgccggtgtagctgtgcccgcgagccgatggaggttagacggcggtggagcgatggtgcatcagctgtggataggcaggcggctggtgaaaacctagcccgaccaatggtggcgttgtcgtgccgtctcatcccctctagtggggttgccgggtaaaaacttagtctcgattctctttgagacctcgacggacagcggcgacggtgctttcgtcacttctctccttggagacatcatctaggcaaccccttgttaaatcgtcccaagcaactggtgtaggctcgctctagattctgatcctcttgtgttggcgtactagattagggaagttggccacatcggaaggcctagggggtgagcggttccattcttctctttcatcctctctctcttattcccaaagatgtggatagagtggggttttgtgtcggttgtaaaggttgggttttgggagatctcgattgtagttctgttaacaaccaaatttgataatctaagtatcggagataaagactagatcgaagcggaatccaagttcgatatcgtatcggaaacagagcaagaatcggctggactccaaatcggctacgaccagatcggctgagtccgagtcagaaagggaaagccgatacagccgattccgacaatatgattcggtttacgtcatcaagctgagttaatatacttcacgtggattgccacacacggatagagtcctaagaagggaattgtatctattaattaggatattttatgtaatttccttagagataagtacgggcaaaaatctgctgcaaagacttatggtatcttagagtttgttagagataagagtcgtgtctgacaaggacatattttgtaatctcgggtataaatagaccccgagccccatgtaatcaattaacacacgttaaaatacaatttcggcgcatcgccacccttttgttttcattttgtttcgacgagttcttgctttcgggttgagctgcatcggtttcgatcttcaactagaggtatgacttgttatggcggcttgtgttctcgggattagtgcttccatcattatgatactctaatcctgtccatgtaagttgtcgagttatcatatatcttatataatctctgacaatatcgctatctaacctctaatcggctaatatctatcactagggagcagccgattaggttaaatatcgacgttggcttagattatataagatatctaccactctatgaagcttccaatagcttgattgtctagatattgtcttttttttcatacttatggttgcatcagttgagtttgacctcataagtcgtgcttagaattataatctctagcctgcttcttggttgttgattagggtagtgtcggggtttcagctgatcttacctgatttagccttatgtttcatgtgcttaattgatatgcttgattcgccctttatattgagatcttattgcttttagatatgttaagcttcttgtttaatatattttactcgttttaatatcttaatatagagtagtatcggagtattagctgatacatgctagatctatcttatcggctatgctatgaacatatataatctcgttgttaatacatattgcgatctaagtgatttatactgtctcggcatggcgaccgatctatcccaatcacttgatttaagtatatatcgacataaagattatatactgttaataactacagccgatcgaatagatttagttcctttattattgcctcgcacagccgatcgatgcaaagatgacatcggctcgagtataaatgatacgtcatcggcgtccggccgatcggctatcatttatggattaactgttattcctgtttcttgttgattgtaggatcaaatcaactgtcacgccctcaaacctaaaggcaagatattttggacctgcactggagttaagcagatctcccaagcctcgtgtttttacatcaacaagttcctttatcatgaaacaaacgatacccacactttaatgtggaacatattgataagtactcatatatgttcaatattataaaaacgatggatagatttgttaaaaatattattttttttacttcaaagagggaattttattgatttcggaagagaggattacattcttggtctatcaagtctaagattcctgcgggagcacacaacttccactcctcacacgatctagacctcatagccatttgagctaaagcatgagcaatcctatttgcttccctcttgatcttgcaaacctgcacactttggagacactacatcatccctttcgcttccttgattgtcgctgcccagggtgatctcgacagctcctgttgtgacagagccttgaacgttgtcagtttccaagattattggcatatgaatccattccatggctacccttaatccttctagacatgccaatgcctcagcttggacagcagtagcacaggatttcagagttttttgcgcagcaagcagcactaaacccctgcagtctctaatgatgattccagcagttgaaactcctgtgtcttctataaaaccagcatccacatttacctttgctgaaccttcgggaggggcgcgccatttatcaacctgattggttgtccgaacctgcactaatttctcctttggttcatcatacattaatccttttcctttgatgtcatcgctttgttgtcggatcagcaacaataccttctcatagttgatgaggaaattaacagactctgcaattgtggccgtcccctttccatggatcatatcattcctgaggaaccatgctctccacagcaagtataaaacacgcgccttgtcagaactactcaagctatccaacaggacaaggagccagtcaggcccagtcatagcaaacttccttttcggcggtagcgcccagaactctctgatgacttctcgcagcgatcacgccatcgtacattcaacagtcgcatggaaaccatgttccccctttacaccacagatagggcagatacctacaggttgtatccttctttttcatttattctcccaagtgggcagcctgctgtgagcaagtttccatgcaaaaatcttaacttttggttgaacgtctgccttccacacattctcccagagcttcctttcaccattggtagcagtgcttgaagaggtctgaacttgagcactctcagttaaattccatgctagcttataggcgcttcttactgaaaaaaggcatgttttctcgtagtgccaagcaggaaagtcagatgtctcctggttcggcacatggatctttagaatagcatttgcatcttcctccgtcgcaacatgtctgattaaagcctcattccaggcgtttgttccagggatcaggagctcatgtacatacgtgagcctattccaattcttcttctgtataacctcaactttctcaccatgcgccacccatctattcctccaaatcttggtagtccgcccatctcttaccctccaaatcagtcctctctttagcaattccagcccatgttcgattcctttccaagttggtgaagtattggacgggaaagctgtatcaataagggagccattggggtagtactttgcttttagcaacctagcgcacaagctatttggctccgcgatcaacctccatgcttgacgtgctaataaagcctgattgaaacaccgaatatcccgaaagcccaggccaccatgaagcttagggctcgtgagcttctcctaggacagcagtataacgtcccgccttcccccaggccaggcccgagctttcataggtcatagactgccctcacagaccaacacatgtcttttctgcacactttgtcctcactcgtgcgcacccgggccaagcattcctgcacacaatttgccttcccccaggccgggcccgagctttcataggtcatagactgccctcacagaccaacacatgtcttttctacacactttgtcctcactcgtgcgcacccgggccaagcattcctgcacacaatttctcggtcggtcatccatcccaaattgctccatgccaagtacgcttaaccctggagttctttggagatcggtttccggaaaagaagttgcaacttgttgatatgagtattctattaatcctattaagccctgggatgtcacatcctcacccccttaagagagatcgacgcccctgtcgatcaaccccaggccaggaacgtctgtccagtgccagcgcatgtgccatgctttcataggtcatagactgccctcacagaccaacacatgtcttttctgcacactttgtcctcactcgtgcgcacccgggaagaatttctcggtcggtcacccatcccaaattgctccaggccaaacacgcttaaccctggagttctttggagatcggtttccagaaaagaagttgcaacttgttgatatgagtattctattaatcctattaagtcctgggatgtcacaagcagatagaaacctctcacaccaatctgttaatctcttagaaaatctttctttgattggttggaattgttctgatttcatcctaccttcgggagttggaaggcccaggtatttatcttcaaaacctgttctttgaatctgcagaacagctttgatctcctcctgcctctcctgtgagcaaaattcactaaacaacagagaacactttgctgggttaataagctgccctgtgcttttctcgtatagactgagcgcctccttcacacttctcgcttgatcaacctcggctttaaagaacaataagctatcgtcagcgaaaagtaagtgggagatccctggggctccccgacacaccttaattggttggattgaaccttccaagctcttcttctccagaatatgtgacaacccgtcagcaataaacagaaacaagtatggactaagaggatcaccttgccgtagacctcttattggacagatgtcaacacaggacattgtccacttcctccatgtatctccaaaacccattctttgcaacacaccatccagaaacgcccaatcaactctatcataggcctttgaaaggtctaatttcagcgcacaaaaattctggttctcccttttgcatttttgatggcatggaagcattcgaaagcgatgagcgcgttgtccgtgatcatgcgacctggtacaaaagcactctgtgcatatgatattacatcatgaaggagcggtctgagccgattaacaaggcatttagctatcaacttgtatatcacattacatagactgatgggccagaaatccttcatctcctccggcgacttagtttttggaatcataactatgacagtgtcatttgctccctcctgcatttcgccgttttcaaaaaacgcttgtaccactctaataacatcactctaataatatttgttaaaatattatgaaaatgatgtagggatgattattggatatgcttgtatgttgatctgtagaatttgatagattgtagaagatgttgtatgcttgcatgagattgaatatgtaattattgtttgatgatgtggcgtggttgcatgtttaactttagagctagtgagttataactttatagaaaatatagattagtatcaattcatcgtcttactttactcgtaaataactttcatataattagactatgggtgtttggttaccgagctatggctgcaccgtgaccagccgaaactgtccagcaagctccaagatagcaggctgcaggcttgtagtcccagcttaccaacatgtccatgataaataaattgtactgtaatttttatgtagtggtgcaccacatttcgataatttgacacaatatttttagtatttgcatttttttctaaagaaaatagtaaatgtgtaccatgtcaattattatgactatgagaaaggtaaaacaattgaaagaaaggaactagaagctcctttaaacagttcattttacagagttttttataactacaatcttaaatcagaagctcatccaaacaatttagttttttttccatattttaagaagatatatttgtagaattaaaaaaaaactagaagccaaaaactatgtttatctagatttctatatttttagaagctaatcagccgcttgtcataatactcccttcgtctttaaatataagtattttggttggatatgaaatatcctgtccacggacggagggagtaaatcttaagggcccatttgaattggaggaaaaacatatgaattttggaggatttcaatcctatggaaaatttttctatgaagccctttgaaacaaggattggatcctatccaatcctttgaaattccagtggaatgaacaatcctatagagattttggaggaaatttagcaagagcttcaacctcttggtaactttcctttgagtatatctctctcatctaattcctgcgtttttcctgtggttcaatcaaacagtcattcctgtgtttttcctgtgttttgtaatcttttattttacacttacattcctactaaaattctacgttttctcagtcctacgattcaatggggcctaagctcagctagagaggccgtttagtcttgtgcacgggtgaggaagtgagtggcgtgtggtgagtggtcgggtgcgaccgttgcgacgggtggtggttcggttcggtgttgtggacgagaagtctcgaatcggcttggctcaacctaaccccataccacccggcggatcaagctccaaaaccctagaactcaacggagcgagcgcgtgggtcgggatgtcggcggcggtgagtgccctccgccgcgccctgtcgtcgtcgtcgtccgcggccaagaccagcagcagcctgcgccgcctcctccccgccgcgccacttcgccgcggggtcctctcgtcgcagccccggccgtcgcgccgcaaggacagcatcgaggtgcattctcccctccctctcttcccttcccttcccatctctagtccgattcccctttccagcgagcgagggacggacgatcgatcgattgattgctgctttttgtgtaaaattgtgtgcgtccagctctctcggagtgaggaggggaggaggctcgccggccgtttcgacgagattgaggatgccgtgcacgccattcttatcagggacatcgaatcctaccgggccagcaccatggccgaccaaggcttcgtcgagagaaggctcacctctctggggttcaccaagggatataccagggaccaagctctttggctttccaagctcgtgcttgcattcttttcttcgtgggtcgtagggactggattcgccaaaatcgacgacagcctccatcaggtcacccatccttgtttgctcatttgcaatttcgcataagctcaactttttgttgtttgcactgcaatttgccaattagtcatttaccatccaccctgctgcagaatctgtgattatcactggagtggagcgttacacatgcatgaattttgtcacccaacctcacagcgatcatactgaagattgtgccgcgaaaaataaatgtgaacgttttatgattctcttctctcaagaacattgggtcgtatcatctgataatttcctcacacagtatgctatcagagtgaaacaaatacatgagaattgtgcatctgtatggttttgagcttaaactttattagaaaggctgtaaacccatgagatgatctatgatcattccttgattttgtggttcatctcttgttttggttgcgcagataatcaattgagctgtttcggttttctctacgtctaaattcactatatctaggaaatctatggatgcttatctagtttagcacttgtctctcttttgatggtgacagtaacattctcttaacttgcttagtagaagtattatgaattaaagggatttaaactacttggctcgggtaacccaagtatatacattcaattattcatgagaaccttttccatgctatacatgaacaagtatatgttgtatgccaacaatttgaaaatggttgatgattgaactctgaaacctgctactttgtgatcaggactgtggtaacacattcccaaataatgtttctccagagtcatgctagattactatcagtcctcaattatactagcatgcagcccacaaattattaatcttgtgtaccgagtcatgcttggttgttaggtaatgattgatgcattcttcatctatatatctatccttccgccatgatttcgtagtaaagctttacttcttttttcgtttcgttttgttttcttttttgaaaaaaaaggcaaaattattgccttatatattgataaaggggtaagaaaacagcatttacaaggggggtgggagtttcggtcatccctgaccagaaacgaggcctactctcccaacggaaggaactcagctaaggactttgctcctaccattatccagagccgtgcttcatccttagttttagccaggatgtccgtttagtgcttgcaagttgcctgaaaactctcgagtttctttctttccacaacttccaagagactaggatgattagtgattttaagtaaagctttactttcaaatgcatagcacaaacaatataatgttgattttgttagtacttacactgtgaaatgttcgattgagctgatattgtgggctttataagttatagcttctagctctgcatctatgctttgcagttgtggaaattaatgaaatttgtgttcttcgaatcaaagtcttacttctatagatcattcgattacccagagctgttttagtctgtaatgcttgtgctcctgccaattttttttttcatgagcaaatttgtgtctattattggcaggtcaattcatgaactgcgccttcctgttggttgacggatggataaataatcaaggatttttttttgtagtgtgtttacgttttaatgtatggtgtgactttaccgtgcggcctactttgtgaagggattatgatttcgagcttgtttttatctcagctgttgttgtggaagagcacatttcgcaaccaatggttcgtatctgtaaaaatttttaaaaaatctttttagaataaagtagcacgtcttcggcagcaagaagaacctctgctgtttcttacgaacctcctcacaccaagttgaactccaaatcagttgctgcatcagcatgaatgaacaacaagtgtttgatgatacaaaccggaagaaatggaatcacagaatgagaaacaatactctgcaggatgagaagaaacaacactctgatgggttcaagttgtggttgataacacgtagaaaaatgaatgaacagaatagtaaaaatatttttatgcgtgaaacttttctatgtctgtattattagtggtttaataaaaaaaaggcaaggctagaaaacaacatatactaggatgaaaacccctaaaatcaattcaattctaaatttacaaaattttaaatttgatttacggttgacaataataataaggggttgttcagttccccaaaaactttttctaaaaacatcacatcgaatctttagacacatgtatagagtattaaatatagataaaaaaaaactaattgtacagtttgcatgtaaatcgcgagacgaatcttttgagcctaactaatccatgattagccataaatgctacagtaacccacatgtgctaatgatggattaattaggctcaaaagattcgtctcgctgtttagttatgaaattagttttttcattcgtgtccgaaaaccccttcgacatctggtcaagcatccattaaaaaattttcattttacaagctaaacaggccctaagtaaagccaataaacagacgagagagagagacgacgaaaggcccacactgtagcaaactgtaagcatgacaagtgggcccggccgagacggaatgagaaaatcctagggttcgttccctcttcccaatccggcggcagccagcgagcgagaggagaggggggaaaccatgcccgcgttctccagggctcgaggcgccgtcctccgcgtcctcgatggcttgaagcgccgtcctccggcgagcggggcggcggatactatggtcccgtctagctacatttccctccggttcctctttttattttcttcttcttcttgtcttttctttgaaccttttcgtgttgccgattcctgtttcccaatgcagagcccagtcaggaagatccagatgcttgaagaggagcttcgtccgtccgggggagaaatctcacgaattctccaacgcgcgcgcgcccacttggaaagacaagaggagaaatttgatcctagctcacagtgagtactgtactattctatctagttccgtagtatatgaagtctcgttgctcattttatttacctttgattcttcatttatatgccgctatgtcatgcggttaagaaacttgctggttaattttgctcaaacaatttcactaaacacacactgcttgttagtcgcttggggatctcaccatctttccatgtgtgtatatatgcagcacataagttcatactcatcgcatcatccatatcttatagccatgagttatcttacgcaacgatcgcagttggtggccaacagccattattattattttttcttgtggtttctgtacaccaccagcttctgctataatatcgacacggattctcattaaaaacagcgttaaagcagtcactttatgattattgtgcttttaggttgcttcatcgctcggttagttcaactggttgatgctttgcaaataccgtgtctcgtctgtttttacaaaacatataattgctaataatccgcatatagacttgggtaatgcattttgtactaagtataaaagttagagctctcttgataaatgccttctttttccttcacgtggaatagcttgggagaatgaatgcttatatagttatattgaattgtctcttttcacatagtgaattgtccagcactctgattggttacaagttgagagatgaataaagcatgcgtcatattcaaaaccagctgtctgtggtgatagttctgaaggcatgtagctatgtggttgttgcatagaatatttaatttaaacgagtcaagcatagtatggttatttcacaaaaatgtatgaagctgttgatatttgtattcactgaatgtatgagatattttatgttgccataacataagaaagaagacgatgtcagaatatcagtgatccattagaatctctacatattcatagtggtataatttccaatcaaccaacagttaaaacaataagaaatgcctatgaagctgacatactgatgctattgtagatagactagtaggacaagatttctaatgttataattcccatattctaacatgtgtaagtgtaagaaatgccaatgaaggtggtaggctgatgctactataggttttggggctgtacaaacaaataattatcacttttgaacaattgaaaacctcaaacaacttgacacatcaactattacacataattttagtcttcttgtgcgcgggaattgtgggatgctaatatgctatgatccatcaccatgtccgtcttgggcaccactctgacccgaaggcccaaatgaaggttgtgttattttgccccttcatctggagattaactcctataacaacaaatatttgtgcacacaagttttaaccttttgttagaaggatcatactaagtttctatcagtaagtttgtcatgtttgacatggcttccataatgctgtttgacattgactttaattaaatttcacctttcattcccacattcgatgaacatcgtggtctcagttatttcagcccatggcgtcactaagtttctgatatagtacttctctaggagcatttgtttgctgaggactgacacattccactagtgatgtgtcatcattataactgttttactattctctacatgcatatatatttctgtacaaagagtccgagacaatgatatatatattttgcaggacgccggagttgttccgtaatggtgcaggttggcaattaaacaccttctttctatgccttttctcatcaatcattgccaactacaagtacaataaggtatgcagtgagatcattacattattctgaatacatgcattatgcataagcacatttaggattctatgaagctagcatgttatttatacaaaccaaccagagtaacaaacttgagaatttggaagaaaacaagcctcaatattgctctgaacgtaggcgcaggcacacagctgttctggcatccctcgtcatatgcaaatacaagctgcaagatatgctttgtcatttggaatagactgaacactaacaaaactactttaactaacagcagaagaagatgtagagctgctttttattgcctctaaatgtctaagttgcgacaaactactccatgaatactggaatttatatatgatctattctgaaatctgaacacaattgaaatgtacaatttttctgaacctaggttcaatactgtttgcattagcatcaagtagtggaattagaagagttttttaatttggaaattaaatgcgtgaacaataaccaatactatatttcctgcaataaggcgttgtcctgtaccttgtgaaagaaatattcatcgatgctcgctgcctcgagtaaagcatttagtgttcaaatgggtggtactcatatgatgaactcgttcaattgacagtgcacaaaacttgagacaccacaatcaatcctatggtaaagaaaaggggtatagatgaatctgcatccagaaaagttgtatctgttcagaaatgctttttcataaaattgtcactgaaaaatggcaaatgaagattatgatattcgttcatcagcttcctttttaaatgtaaaaatggcccactaaaacaaaattcatggtttgttgatcttgagttaaaagtatcttttgaatttgcagttgaataccggtccattattttcactccagacatttcattaagtaatttataggagggaggggcattttggaagctggataacgatggccctagtactttttgaatttgaaacatgttgacttgattaattttatgaaactagaatctttaggagtaaagtcagaatgatggcataacctcttagcctccaaacaagagttgtgaatctcaaaggactggaaggggagggcctttcgattttgcggtagatgaagaagagtgggtgcaaaaaactagaaagctattagcacatgattaattaagtattaattattacaaatttgaaaaatagatttatttcatattttaaagcacattctatatagaaagttttcacacgagacaaaccgtttagttgtttgaaaaacgtgttaacggaaatcatggtaaaatctatatcttaatcaaaaaagaacaggacctaagtagtgatcatacatcacagatggatgctttggaattagtgcaaatatgtgtggtagaagcataaagcaccaccaatacaaaatttgtaaatggtattttgaggtccaagtttggtcaaaacaatccaaatctactaacaattggtagtgcataaacgctagtctattaactccacttgcaggcttcctagcataagtaatttttttgttgtcttcatttcctttacattgtacactaaattgttttggtgcccgcaccgcaaccagttttcagaagtttcttatgatgctctgacacgaattgttgatcaatcttggcaggttgattgagctgtccttgcgttgtggaggatgtagccgagacggaccactggtatttgcccctcagtaaaatttgcctcagtaaatgactagtgtatggttgttttcatgatttgggattgaaattactcctggccggttgtttaaattgcaccatgacgtgtgctctgtgacttaagtagctgagtaccaatggaattgtctagttaccatgttgtggaattgtctcgttataaattgttatgcaactggcgattcacaaaccccacgacgagtctccagtagcgatctgttgctgaaccaaacatgaattcatgcgtctaggaaagagacggaacaacgcgagacgatagttatgaaacatgttacacgctgaacttacacaggaaatcatcactacaagaattttaaaaggcatcagatggttatgaacataatcatatataccacacgaaagtagccgcatgttcaacacgcatcttaattagaactcagaagtgccaactcaaaacaaacaatcagcatcatcatgttttgcttgtcaaaatgtcgcccttcccaagaaagataaagagcataaattgcttgtcagcataacaccacagtccacagtcacatgcttttaacttagttataagcctcttagaattaattattaactactagcatttggttcatgcttctccggttctcccgacctaaacagcaccccaaaaatcaccacggctgcaatctgcttgcaccacagcttagcccaactctgctgttcaccctcccggcgcagactgtacttacatgagaaataagtttagatttagtacacactgctcaaggacaaatcatgtgtgtaataaaaagaaacagcgtacttacatctttaggcattcagacagcacgagccctttctcaacattggcatgcgtgatcttacctctcgctgaaaatatgcctgcctgcacaattcagataccaaagttaaaataaccagtcgagttggagaaactatttgccggactcaactcaaattgattattatggtgcgcatgtaatgagggcagtacttgtcagcaggcatgcagcagcattactgatagtcaaacaatgagaagttagatgcaagaagtttctgataacaaaagaaacattatgtggatcaacggaatgcctagatgacgacaaaaaccatataaatctcagcatattaggaactccctggctgtagtcagcattataagctaaaaaacgcaaagtcttgaatctgcagactatgattgtaataatgtagtgcacccagtaaagagatgaacatgcatggtgtgacatcgtaagatcataatattgtaaattgaatttccagatcaattcagaccaagtccgctcaaagtaaggtacgcttggattggatcacacggtaagtacatctccaaaagcaattcaacaaattcaaaatatacacaaccattaaatgatgaagaatgtgcatcctttttcttcattaacctacatccactctaccaaagattggtccaagcttgcaagagtaccatccatttgaacagcataacaaaaatcaattttatataagaacctaatatcacttgtaatgagaaaaattagccagctatcacttgaagtcttggagatgctgttttttagagagaaaaaaacatgctcaacacgctacaatccgtaaaacgccagtgcatgtttcctatgttactaacttctcctatcttcatcaaattaaaggtgaaggcttccaaatgacacaagttttgtatctctcaccacttctcaaagatgggctaagttatttggtgagaggaaggtgtagtattctttcaatttcaaattcttgttagggggaaggtagtactgcactactgcatcatctaatcgaacaatttcttggagtaccaaactaaaataagtaatggagcaaacccaccgtagtattgtactaagtttagcagtagcaacttcaaatcagcactcagcacatttgagtttaagaccttatcacaatgtggatttagtgcgctacttctatcttctcctctacgcaagaaatgtattaaaactttagttgaaatttcaattagttggtatcattacctacgtactggtgaaacatctccaaattagagctcgcgttattgcagatgagttggaatggaggctagtcctctcaaaaaagaaaaaaaaaatgttaccagttcgccaaaaccaaatactatatcaggtcataaaacccttacagaagttccacccagaattaatccctctagaaagcacttttcgagattcgaaaacagacatgttctggcattgaaaaagatctggagaacaacagagtaaaaactggccatggagtgtgagaatggtggaaagtaatacttctactttcgactaatgttcccctcccgtcaccttccccaaaatgtttaatggaaatggacaagagagctggtgcacagtataggtaaatttggaaccatcttgggctttccctcggaagaagaaaacagtttggggatttgggggtactaaccttgttgaatgcagatttctggagcagaagcttgtcaatctcagtgtttgtaagatcaggtcgaatgccacctcccattgctggagagaaggcacggtgagcacctgctgcagatgccacagctgaggtggcgtggtgggtgatcgaagatcgtcgaaataaggaagccatatgcccccctctttcagagctagcagttcaattaattcagttaaaacagttgagtatttttgtttccttaaaaatcagtaccgaattaactagaatgaattctcaatacagaacctaataaacccagctacatcagcagatcagcttgctctttttttttttttggtatctaagtgtatcattactacatgcaagtgtcatgtgaccgttgtgacgtgagttataccacaagtaaagaagagaaaaacctggaatttcaccaagcaaaccagagctaaaaattttaaaaaaaacagaacgtacacaaattcagaagtaaatctatctatccatttattcccaacaacaagaagaaggaattaatcttctggacatgataagaatggttgccgtgccacaatcacaagcgatcacacaaacacgaagagtttttagtcccaaatcagaaactactccagttcttttagccgcggacggggagaagatcagagagaaaaaaaaaatccaaattacttccaactcgaaggctcttgatccgccagcaaagctggtgggcgaaaggaaattaagagacaggtggatgctggtacctggggcagaggcggcggaggcggcggcgatgggcgagagaacagtcggatcgccgggacagaaaaccctagaatatataggaggaaggaggtcggccggaatggatcccctcaagttggggtagaactctaccggtggagttgtccaaatctatgtcatctgttacttgtttccaacggctgagataatgcctcatcagtttcatctgataaattaactccttaaattaatatgatttttaaatcaatttttttatagattttttttaaaaaaagacgtactgtttagcgcaattcggaaaacttgcgcgaggaaaataagagagtatgagttgggaaagacaacttccgaacgcactataagagcgactacaataaaattatgtaagcagattgtacaagttgccatatcatatttgtatttatgtggaggggagaggagaagaaagagaaaaaaaacgggctatagatttgtaaccaactattattaaacttgctcaaagattatgttctttcatcccttccaaacttcaactccctcgttcacacgttttccaaattactagaagatttatttgttttaaaaaaaaaaatcatacatgaaagctattttaaaaagttctattaaatccgcggcttcatttcaccaactacactagcaaacacaccctaacaaatgtccaaaatggagtctaatccctaaattgtgttttggaaagaaaaaaaaaaggtactccatttagttctcctaactggcgttccgcaaattggaattccctttcacgttctttactccttttagttctccactaatctcccaattacacgcgtgagatgcagagaatataggaaaggtgtgggaagggatcgtgccatggaggaggagacggactgacggagaacgatttctttttggggcacaaacaaacccttcgatgctcacagatgctcacatcgtccgactgtttgcatattaattagacgcaaccaagcaaactacatacttcgttttaaagtataacaacgcctttaaattttattcctacttaaaacaaaaattgccctaaaatatactatataacaacatttttcacctatattttttctcaactaaatacaagtatacaacattttaccattcaaattccttacccttctcaaccaatcacgatattattctatttaattctactatttttttaattccaatgtctaacctaaaactctttatattttggaattagtatatttggttgggggttgtttttcttcatttcttgggtggccacggttcacgatttcgtttcacggtcccaatgagacgagtaattttgcttccaacaaaatttaacaagaaaaggagcgatttgaagaagctccaaattgacattttgggtgacgaaattcaaagaaattgtgaaccctggggtagccaggattcggagcggctaaaccagtgtttcttcccaattcaaaagacaaagagaagactcagcgttcctttttccttctaccagcaaagctgctgtgtactctctccgtactcgtaaaggaagtcgttttggacagcgacacggtctccaaaacacaactttgacttattatttgtacaaaaatatttattgaaaagtcatatgtatacttttatgaaagtatttttcaagacaaatctattcatatatttttttacattttcaaactcaacaacttaagagttattcatgatttatattcccaaggtttgacttaaacattatcctaaacgactttctttataagtacggagggagtatgaaactaaatgtctccactgcgacatgttgaaatgcgtaggccaaaagtataacaagtagttaataaaaatgtacaactctaatgctgcctccagatcacaatgtaacagatatcagcatagttgaatggaaacaaacagtgcagttaacatatccaaagggagatctagattagatagagacttccacatttgcacacatgggacaccttacatatgtcctctacaggcgggcttcttaattcactaaagattgcctttttttcctggttttctcctcttccatacaatagccagtgaagtagccaccaagaagaacggcggtaatggcccatgatcgaccgatgtttttgaagtgaacctctctccgaacaatttcaaagctacaaacaaacatggaaatcgtttgagctgtgattcaaacaggtatgaaatggaaacaggggaatatgcacgcactttgaaatggttttgcccaccattaccaatggcacggaattgagcttcttccccttaatttcatccagcagtgcatttagctgaaaaaaaaaagaatagcatccatcaaataaagcatgttccatctggtttatcgtactagatatggaactaaaacgcagtatgaaacatgtaccatccaacaaacacctataaccacctagttgcatgcgcaggccgaaaaaatgaccacagatcttgacacggaaatgtccactcaagaactattttcatattttcataagcgccaataaacagaatgaatatgtgtttaccatgaactttccaatggaggcatgagcaaatgaataagttaatatcaacaatttaatcataccaaatcagaccacacttgactataacaaaagatatatattttttgacggttcaccgaggggcgaaatggccacctgaatatattaagtcaaatggtcttacacagggcaaggctttcgctgtgcaaaatatcccgtgatttttttcaggtgctaaagaagacctaacaacaaactagtataagagagcatacagctacacctaatgcgcgtagagaatactaacaaatacaatcaaggatcttattcagtcatggttgtttgatcaagtctgatataacagaataatgaaggatatgaagatggaaaaggtctggtcattgatatgctcaaatgcacaatctgtgcaactgagaagaaatattgttcacatgctctttattaatgctgaaacgtgagaggcttgggatcttcttacacgagtttataaatgcctatcagacttaagtagttgcatcaaacaaagagaatgaagtgatcacaccaccgagggcaacagccagatgcaatacaatcatcaaaggaactacaaagccaaacataatatgtactccccccggacacaaaaacatgtcgcaattgcatgtgtacacgcaaaccatattaattttgatcaaatatattgtttacaacatgtaatttggacatatgaaaatggtactggtaaatttggtacagatcgaatcaatactttcataaatcacatatctataactcttgcattatggaaataaaatttagtggacaaaatgacatttgattactttgaaaagtaacaaataatagttgtttttctttaactgaaggtagcatatgatagtgctgaaggatattcagagagctctatagagaatgcacatgtagatgtgtactccagtattttgtaacaaaatttatcagtactccatgtagatgtacatagtgctccatgtagatgtagctagtgctgaaggagtataaactaacaaattggcatggaaacactagtattttctaaagtgggtttgtatcctccaaactttataatatattgtggcgcagaactttcatctatggataaattgactctgaatgtgtcttatcaaaagaaaacgaaaaaagaaaatattttaaagaacacatgctagttccaaatggaatgcatatgatagcaactgcaatgtaacgaaacataggcaaatgatgtttgttcggaataaaaagcaccagaaggtttagccgtttagctaattcaaaccataaggaattgtttcctttggttttgataacattaaggtgtttgtgatgtatcataccatgcatttcaaatatcagttcaaaaaatacgcagtggaagttaagcatactacagtatcatgaatagcactgttcaaacaagaggccctaagaacgggttaagaaaatgatgaattctggaagaaaggtactttcacagcataagcgattcaatcataaacaatgaacttgatgtctgaaatcggaaaaataatcaagcaaccacacctctttacatatcaaggaacagaatagcacaaaaataatgacaggaaaggaactagggctagggaagacacaaacttgcaactttacagggcctactcaagcctgccaaaaacaacaattccagcaccatgactaattcttactggaccaagaatgctgatgaggacaagacaaggccttgagctgaacaaaagacttggcacagatttggatgcttatggtgagagggaacgcatgtagaggaatgaagcagtaacggataattcaagattgactagattacgtgggtcgaaccagagcattgcgggatctaaagcgaacaatggatgatgcctcccatcaagtaaaaagacattatctaaaaatcaagtaacaagtagaacccccacccccttccacaaaaaagaaaagaaaagaaacatttgcccccaaaatttgcagtatcaagaacattcaaggcaacaccttttatctatctattcagggttcagggtgcaggtcgttctgcaactcgcgtatacaatatttggtttcgaagagggaaagaagaagaagaagaagaagaagaagaagaagaagaagaagaagaagaagaagaagaagaagaagaagaagaagaagaagaagaagaacaagctttcctctgctgtaacgaacttgggggccgggattaccttggtggccgcctcagataggggaggatacggatccttgtggacgcatccgctccctgcctcgtgaacgccaggagctggcttgcgctggctgagatcgccgccgcggacctcggaagaaagggcgcggggacggcgagcgcccgcgcgtcctgccttgccgccgcagcccaagaaagatcgcgcaaacgaagccatgcccactcctctctttcgctgccagcgatcgcggctgcagggttaggttgggggttctggagtggagtgcgagaggtatggggaattttggacttacgccgttttagttggtggcaaaatcaatattaaagattaaagttgggtaagaccgaaattgactctttccttttcgggggaattggtttcacagtccattccctcagttattaaaaaactcaacctaactaaaaatataacttatcctaataaaataaatttaggcagagatactactttagagctattactaaaaccatattttattattaaatattcacttcaaatcactcttagcttatgataacaatccgacccaggtggggttgcccgaggcccgataacttaaggttgtccggaccccaacagtttcttggcacacccactaggggaaaggcccaatctccctaaaagactagtccaatagaggaaggttggctctcccttttaagatggcttcctcccaagctaagcaatagcttatgataacaatccggcccaggtggggttggccgaggcccaataacttaaggttgtctggaccccaacagttctttggcatacccactcggggaaaggcccaatctccctaaaagactaatccaatagggaaagggtggcttccttccaagctaagtgaggtgggattattcataggctcacacgttggccgaggcccaataacttaaagttgcccgggattattcagaggctcacacgttggccgaggcccaataacttaaagttgcccggaccccaacagttctttggcacacccactcggggaaaggcccgccgtctttgccagcaggtaatagtggaggagatgtcctcatcattcccacccccttaaacaagggcctagctctgataccaaatgataacaatccggcccaggtggggttggccaaggcccaagaacttaaggttgcccggaccccaacagttctttggcacacccactcgggaaaaggcccaatctccctaaaagactagtccaataggggaagtgtggctctcctttttaaggtggcttcctactcccaagctaagcaaggtgggattattcagaggctcacacggtcgtcgcccgactttgacgtctttaccagcgggtaatagtggaggatgtcctcatcagcttatctttgattttaaactagtttattttatctttgtttcaactttgaaccaccaaaaacttttttttatcgcatcaatgactacatgttgggcaaccagccataggtcataccccactagatgatggggcgcgcctttgcgcaccgcctagaggtatgctgcattgctgaccctgtggcaacaatgggtgaatgaaaatcattgcgttgcgctggatttaatccatatgcaatgtgtcgacgtttgatgtcgcgattctggtatttgcatagtatggggatcgttggtaccagggtatatgcgagattatagtaaagaagatggggacgaggatttttatacaggttcgggcccctgaattgttaggtaataaccctactcctgttggccgaagccggtcgttgctcttattcaccataatcacactaatacaatatatggggtagcctatctaattgttgtcgatttggcggtctgaagtgctgactcggagtcgacaacagggtagcctccctcctcaaatccgttctcggtgagatcagagatagcgctagacccctcccgacggcatccataggtaccgatgaggatcaactaggcttctctccgaagtcgatatccggcagcttgtcttggcgtatgttggcttgtatgttgatcttgtgtcttgatctattgttccgtttctcccctctcctcctagggggtcttgtatttatacccataggtgtccccttgtccaaatagaactaggaaaaccaatatggatataatccgagtagtccttgtcgtttccatgtagaactctattcatccttccttatgcggaactcgctccatatccgaggtcagtttccgtataagacatggtatgtggtgggtcctgccgagatttagtcaactactattaggtatgtggtatccataaccttaacacaatgcccagtgtattttaatccatatgcattgctggatttaatccatggatttgcatagttagaaatatctagctccataaaaaattgaattcggagttgtgccaaacagacatgggtctttttatacatttatattcaagcttaattagttctaaaattgctagatgttcttatattttaggggggaaaaagtagcatataacaaaaaatggttctttgggatgcaaagttggatcaatcttttaaatggtttttcattcattttcctatttattgtttctcctaaaaatataggatattaatgttatcacataattatctcaagtttcgaatttatatttagacttaacgtgtagtatatctgttgatgcgaaaaacacgaggcctgggagatctgcttaactccagtgcaggtccaaaatcttgccttttaggttcgtgagcgtgccagttgatttgatcctgcaatcaacaagaaataaagataaagaaaccgcagttaaatccataaatgatagccgatcggccagccgccgatgacatatcatttatcttcgagccgatgtcatatatgaatcgatcggcagttgtgaataagcaaatcataactaaatctactcgatcggctgtagatgttagcaatatataatctttatgtcgatatatacttaaaccaagtgattgggatagatcggtcgtcatgccgagacagtataaatcacttagatcgaaatatatattaacaatgagattatagatgttcacaacatagccgatcagatagatctagcgtgtatcggctaatactccgataccactctatattaagatattaaagcaagtaaaatatatcaaacatagagcttaatacacctaaatgcaataggatcttaacacaaagagcagatttagcataacaattgagcacataagacataaagctaaatcaggtaagatcggctgaaaccccgatgctactctactcaacaaccaagaagcaagctagagattataattctaggcacgacttatgagatcaaactcaactgatgcagccataagtatgaaaagaaagacaatatctatacaatcaagctattgaaagttttatagagtggtggatatcctatataatctaagccaacatcgatatttaacctaatcagctgctccctagcgatagatattagccgatcagagattaaatagcgatattgtcagagattatataagatatatgataattcgacaacttacatgaacaagattagagtatcataaagatagaagcactaatcccgagaacacaagccgccataacaagctttacctctagttgaagatcaaaactgatgcagctcaacccaaaagtaagaactcatcgaaacaaaacgaaagtaaaagagtggcgatgcgccgaaattgttgttgaacgtgtgttgtcgtattacatggggctcggggtctatttatacccgagattacaaaatatgtccttgtcggacacgactcttatctctaacaaactctaagatatcataagtttttgcggcagacttttacccaaacttatctctaaggaatttacataaaatatcctaattaatatatacaattgcctttttaggactcaatccgtgtatggcaatccatatgaagcactttaactcaacccgatgacgtacaccgagtcgtattgccggaatcggctcaatcggctaaccctgtccgactcgaactctgccgatcctgatcgtagccgatttggactccagccgattcttgctttgtttctgaaacgatcttgatcttggattccgcttcgatctaatcttcatctccgatactcagattaccaaattttgttgttaacaatatcttatttatccaatttaaaaatgcttcatttataatttttttaatggatgacgttgttgacttttgcatatgatatttggacattgtcttattaagaaaactatccaagtatcatatatatatatattacttgtatttttcatatttttattatgacgatgataaaatattaaataacgccatctattaaaaatgtggaaggagtagtaatttttacttctttctttatttctttattattttctttattttttccactttcattctatttatgatcattctatttaaacattctatttaacgtcatcttctttttttggccggcggggttttcactccgatggtcataaccgcagtgaacaagaaaggtcaacgtcggcgaaaatgctttttaaaggcgatcgaacacgtgatgactatgtgaggttgtgacttgtgacgtggttttgtgccgttgtgtgcatcaggcgtagcggtcgagatcgacgaagcgaaggagtcgtcgttgctgcgctgttgtggttgttcgtttctggtaccagtagcgaagaatgaaggaagaagcagcagcaaccgttggatgacgatggatagataggattcgagctaatgccaccctctgcattagcttctccaatgcagaggatctggatccaatgagtaccctgctgaagcttcttcagtttcttattgttttgagggtgaatacaatgtttccatgtactccataagtaagataaagaccatctagctgaaactgattgcagcaaaaacaatacaacgagaaatttaggaacctgcatgcactttatgaaactgcttcatccatttgtccagttggaactccagtgcagctttttcactggccatgcccatgcatggattgtagttgtgtttgctgggagaatatggacccatacagatatcacttaggctgtgttcaaccctaacttccaactttccatcacatcacatcacatccaaaactttcctacacacataaacttccaattttttttccaaacttccaactttccccaaacttccaacttttttcaggaactaaacacagccttagtcttattaatctaaatatcaaggccgacaaaaaggaaaagaattatttgattccaagcataccagaaagtcagtagtaataactaataagctgcattagtacggaggttatgtcagtcaagacgtttggataaagaaatttaacccgtgagcatgatctggtaataagctgcaatactgcagtagtaatgtcggtcaaagtagatgttcaattatctaaacacaaacataaaaaagcccgacttgactgccctaaacaaaaacaaaagatttactatgagtaaaagaaatagttcctgatggagctctgaagcacaacggtgcaaggctgcccaggttgtcgctggtgcctcttgttacccaccatggatccagcgccgctgtctcacctcatcctctccggcctacatgctccaatgccctcaccgccctcgccaagctctgaacggccaccatcggtttccacatcgagcagacgcccgtgcacacgtacaccatcccagcagacaatctacagcactgataaatcgagttcaacctcgtcgagggcaggccgataaatgcagaataggttgcgaggtgatcaacagcttaattttaagcaggccaaacaacagacatgtttgttgctcagttataaagcatttgatggagcctgcaaagataatcacaagttatttgcaaaaaaaactttactatggactcgtgaaagcagaagaaagaacatgtagagaataaacaactgtggcatataaagtctgcaaataatagtttcttttatcgccctactgtgtgcagagcagcaaggattgttgaggagctgttcttatagatgtacaaggtgatttctttgtagttttgagctcacaaagttatgaaatcgtaaaatgcttttacgaatgaggcttgcatgcacagtggattccagttaatactccctctgggtaaggactaaggattcaggatctactagtacaactggcaagaaatatgatactaaatgacttatcagttgggatgtgctatcaataacaaagctgagtccagagtcccctttatatgtgtaactaccatacagtagcattaaacaagggcgtactagtcattctatagaatctaacagttccttaacttcaaatgagaaaagcgtactacattattcatattcttttctcaaatttcaacaaacttaaatgaagagacagaattaattaacttaaatgtaggcaagtagaatgatgaactgattatgtactaagaaaatcaagagtgctctcctgtgcaaactaaaagtaaagccgaaatactaaacgagaacacaagggtacatgcagggtgtccaaatcatcaatttggaacttatttaacaaagagcaaactgatcagcatctacatagtgcttctactgaaactgtgcatcctatattcctaatttacaccgagacatcaagggtacaacctatgtgcttaatgtcttgcttccatatatagatcctttagtgtaatcgatagttgtatggtaaaaacttttgcatggctactgttgtgtcaacagtagattttgctgcagaacagggtgaccagataattgcagtataactatgtgtagagtatataagcacatgtttttcactattcttggacctacctacaattcagaaaatgcgtctctgcttatgcaagttagcaggagggcaggaagatcaataacctgtttcagacggtcatcgatcttggcaaatccaatcccaacagaccctgaggcaaagaagatgagaatcagcttgcacaaccatagagtttggtcacgagtgtaactcttttttatccccatagaggtaagcattctttcaaagaaaccatggtctgccataaggcttgatttgtaggcctcaatgtcgttgacgagattggcatgaatggcagcttcgatctcgtcgaaacggtcagagggcgtcttttccagtttagagagctacaaagacacaggtgccaacatgaataccgacggggtatgccatataacaaccgattcaagaaagcttaacattcaactgaattatattgcacgatcaatcagaatgtttcgattcagagttagaattaggctgtttcaaatcacaaccactataaactaaattttcaagcattttttttgtttataatgacataagaattaattcttaatatggtagaaaaacgcatacaactctaatattaaaaaggccgaatttatcggaaaaggagtatccacaattgattgattatttaggagtggaccataaaccctaatgctaaaaattagggcagaggccctcaaaattccagaggtccgtcacttgaggagctcgattaggtcgatgagaagatggagacggggcgcacctcaacttcgccgctgggacgacgggcctgcggaggcgaacggggatcgccgtacctgctcggcggcagcgacgagtggacggcgcgggcaaggggtagaaggcggtggagggtgttggttgtcctggccgctgccattgacgccgccgacgtagaacacggcgaggtggcgccgcgagaaacccgccatgatcgcagtcgtcgcaagggggaagccatcctttcctcaccctcttcggctcttccccgacagggggaagtgatgactcaaaaaaaaaaaagttgagatatcctaacgggactagctattgggctgtccacagtttttgaggtccagagcagtcaaatttttgcacctcacgatctgcaatcaatgggttacaggaaacgggtctggaccagctgaaagcatagaaccaacctgtttaaagtgcgcgggcccgttaagaaacactaaacatgccaatcttttaaataaaaaacaaaacatacctacaaaacaaaagacccatcccaaaaactagactactcagaatttaattactaagcccatgaagagaacaaaacacaggcccagatagagatcaacttgcatatcaagaaagaaaaagctcgggcatcacacagccaaaaaaaaggattcgaaacaagaagcagatctaaaagaactcaagaacacagccgaaaggagaagaaaaaaagagatggaggaaaatccaagaaatgaaccaacatctgctcctccaggttgaatttctcacatacttttaagattacgttgcaatttcagtttttttcccaagaactcttcacccccatctcattttcttctgttcagcatttagatctgagcatcacaggcaaaaaaatcagtcacatttagatagatagaaaaatgctaattcaggtttcatctaccatgtacacttagaaaacagtccaacaattaatcttgcaaatgataaaatatgaacgacataaactcccaaaaaaagcagttacaaagctacctgggtaacaaaactaaccctagctagcaactagccgatgtccagtagttttaatgctcttgcatcatacaaaacactcttgtaactgcttcatgtaactggataactggattatcacactctgatgcttttgcttcttttttacacaatgatacatgcaccactaaaaaatcatctttcaacacaatgcctaaaagctgcatacaacttaagcaaacaagatgaaaaaagactagtgacataggagctcatgctcaattccaatgcatgccctgtaacttccatgtaactaccatgtaactgctatgtaactaccctgtaactggcatgtaactacgctgtaactgccatgtaactaccttgtaactgccttgtaactagggtgtaaatattatataactagattataaactgagctaattttgcaggggcaggaaatatgacactctatgggcacaccatgttgtatgatgagcaccaaatgatgtcagattctacgaggattgtgagtcacatggcatatttttggaaaaatatctacagaaattactcagcatgcaaaaaaaaaacaggtttagattgtaatgcacaaattcttgcaggggcaacaatgtaccttcacagggttgatgcacgaaataatgcaaactccaaaaagtgctataaatgctgatcaagattatttgggcatgtccagagatatcttacatactccagctggatttgaggtgaaaaatgaaataatctttttggttaaaaaactttacataaggtaacatggtatttagatttgttataattccttgatattttatcattgtagaactcaatgataatgacgagcaataggtttcctgagaactatgagcaaatgggaggtgaaatagaacaaggaacacaggtgaccaattcgcaacagtacatgtcaaacaaaaaaaatatttatgtaaaattatgaattttaatctgttttgttatcaaggcaatttgtgatcaatgggcaagcaagaatatagaagaactatacaacatcaacatgaacaatcagcagggattatcttctattatcaagacacttgccagtcgatggagcaaaaaagatatagatgaactatacaacatcaacaacacgcatcaggtaataagaaaatcatacagattataccatatgatcgaaataagtatataggtgtggaaaacattaagtatttgttacttacataatgcaggttgtaaatggcagcacaccggaagttgaaaacaatgtcagcgcatcggaattggaaaacaatggcaccacatcgaacaaccaggatgatgaagacagtgagaaccaaaacacctgggcatttgaatcaaacaatgaaacctctgaggtaagaaatttcttaatttaattaacttaaaatataaaaaagtacatcacacaatttagtgatataaaaaaagaatacttaaaagcacatggcaaaatgcagggacaataagctcacactgagaactcgacaattgatctggtggacaaaattagagctgatgaagaagaacacagagatcaggttgtggccacagaaccccagatgcaggaaaatagcaatccagagactgaaagtaatcagttgataactgagcaagatatagacaattttttggaagaagatgaagagagcaccccaacaatagatagcaaacacatgccacatattggaatgcagttcaaggattacaatgaggctcatgggtttttttaacttttatgcttatctggttgggttctcagttgctattacacacacgtatagaactataagcaagaagagaaacaacgagattaccagatacacatacaaatgcaatttacatggcaagaatgaggataacaacaaagacttagaggagcagtttcagactgagaggcaaactaatgttctgataaggtctgactacaagcgtgtaatggttgttaaagagacagtagaaaatggaccgtggaagatttcgaggttagacctgactcacaatcaccctctacgcccgaatgaacaaaaaaaaagttcctccgttcacacaagaatatgacagaggaagagaagaggctgattagtgttagaatttcaatggttactctcattgagaagaggatggcactagagatggggcaattttctggttttctttattcacaaaacacaaagccataccttcccgagggaggttggatacatatatatatatagccatagctggctggatggctgctagctaattgctgcccacactagtctaaaatttgaacgcgatgctgtcctagagagcatccaaactaaataaagcataaaggagatgctagatgctgtcctagggaagctaaaagcaaaaccgaaagatgctaaaagcaaaactgaaaggatgctgtcctaaaaggggaaaaataacctaaaagcaagagaaggaccacaaggaccaaagaccacaaggcttattccatcattctccccctaagtcttgtgtgtcgtcttgtgggaaagttgggccatcccgatcctggagcagagctcgaggaacttgatcctcccaagaggcttggtgagcaagtccgcaagctggtccttggtgttgatgtagctcgccttgatgctcccttcctccaagtagcttcggatgaagtggtacctcacccggatgtgcttgctccgttcgtggaaaacgggggtctttgccagggccagagcggacttgctgtccaccctgagctctaccgctccagtgtctctgccgaggagatcaccaagcagtcgagcaagccagagcgcctggtactcagcctcgcagctggacagggccaccacctgctgcttgaccgactgccagctaacgaggcactcgccgaggaagaagagaatcccgctcgtgctcttgctggtgtcgatgtcgccggcgtggtcgctgtcgctgtacctgaggaagtgtgctttgccaggacacctcgagtagtagagaccgtggtcgagagtccccgcaatgtagcggatgatcctcttcacagcctgctggtgctccgtcgtcggtcactgcacgaaccgactgacgtagccgacggagaaggccaagtccggccgtgtgtgggtgaggtagcgaaggctccccacaaggcgccggtactgtgtagcatccacctcctccgccgtgctgtcgtggctcagcttcagtctctcctccatcggagtgagagctgggttgcaatcggtgagcccagccagctcaacgacgcgcttggcgtaggcggtctgtcgaagcgtgatcccgaagttgtcctggtgcacttcgatccccaggtagaagaagagaggccccagatcactcatctggaaggtggccttcatctcctccttgaatgccgccacctccgcatccttggtgccagtgatcaccaagtcgtcgacgtagacacccaccagcaaggcatttcctccattgccccgccggtagatggccgcctcgtgcgggctttgctcgaagcccatccccttgagcgtggaatccaacttggcattccacgccctcggtgcctgccgcaagccgtagagggccttgtgcaggcgtagcaccttgccctccttgctggggagcacgaatcccggcggctggtgcacgtagacctcctccttcaagtcgccgttcagaaatgccgacttgacgtccatgtgatggacaccccagaattactgagtagccagcgcaaggaggagtcgcacggactccatccgtgccacgggagcgaaggcatcgtcgtagtcgatcccctcctgctgcacgaagccgcgtgccaccaagcgagccttgtgcttgacgatggctccggcttcatccctcttcagcttgaacacccacttaagggtgatcgcgcggtgaccacgagggaggtcagcaaactcccaggtgcggttctcctgaaccgcgtccatctccgactgcatcgtggcacgccatgccgcatgtttctcggcctctgcaaaagacccaggctcaccgtcatcacacgcaaggtgcaactgcgcctctaggtcgcgaggcaccagtcccggcaccggctggtcgctgagaagatcttccatcgtacggtaccgtagctgctcgccgtcgtggtacgcgtcgatgcgctccccgtcgtgggagagtggagtagcgaactccaccgggctgcgctcaacacgagctggcgtcggagtagacgtgcccggaggagtggctgttggtgctggagcacgtggggacaccgactggggtggtgtcgacgaagagctcgtcgtagtcgaagtcgttgcccgaggttgtgttggtgttggagtcggtggaggctcggggactgggtagacacgctcggtgaagaagagctgcctactcccccagctccctcgaagtggacgtactcgatggtgaagtcgtcgtacgtcggagtcaaaccatcatccaccgccttgtcccatacccaccctcgcccttcgtcgaacactacgtcgcgcgctgtgcgcacacgctgtgtctccgggtcgaggatgtggtaggccttcgagccctccgcgtagctgatgagcacccctggggtgctcttgtcgtcaagcttgccgatgtggccaagctccttggcgaacgcgaggcagccaaagacccgtaggtgggagaccgccggcttgcgtccatgccaagcctcgtacggtgtcctgccatcgagggccttggtaggcgagcggttgaggatgtagacggctgtcaccaccgcctccccccagaagatggccggcatccccctctgcttgaggagagcccgagccatccccacaaccgtctggttgtgccgctcaacgacgccgttctgctgcgggctgtacggcgcggtgtagtggcgctgaatgccctcatcaacgcagtacaacgcgaattcagccgccgtgaattcgctgccgttgtcggtgcgcagcacgcgcagcttgcggccgcactccacctctgcagcggcctgcgcgcgcctgatggcatccgcagcctctcccttgctgccgaggaccatcacccacatgtagcgggagaggtcgtcgacgagcagcaggaagtaacatcgtcctcctggtgtggccggtgtcactgggccacacaagtccccgtgcacgagctcgagccgctccttggctcggaagctcgtctgctggggaaaggagagccgccgctacttcgttaccatgaagacgtcgcagagctgctccacatggtcaaggcacggcatgcctcgcaccatctccttggcactgaggtgcttcagggcctcgaagtggaggtgcccgaagcgctcgtgccactgccatgcctcgtcgtcccgacgagcggtgaggcaaactggttgtgcgacctgcgcgccgaggatgtagagtcgattagtgcctctggttaccttggcaagaaggcgacgacggcgatcccaaatcctcatgagtctgtcctcgaccaacacgcgtgagccgttctcatccagctgtcccacgctgatgatagaattcctcaacgcggggatgtagtaaactccggtgagcagcctgtgctcaccggacttggcggtgaaggtgacggagccaacgcccttgatctccacgccggaggcgtccccaaacttgatggagcctcggacgccggggtcgaactcggtgaagaactcccgtcggccggtcatgtgatgggtggcgccggtgtcgaggtaccacccatcagccttgttgttgctggagctgttgcagagagagacgagtaccttcggctcatcaaggtggaggaaagccgctgcggccggtgccgctggaggaagctcgatgcttgcgtgtgccaggagcagagccggctcttcctcctccacctgtgcgacgtgggcctggccacgtcgtggctgtcgacagtctttggcccaatggccaagcttgccacagttgcggcaggtgtcgtctcgtgccggcttgtggttgctggcggcgccgccctgggcacctctgcgagcgccaccctcggcgcgtcttcgcgcccaccgcagctggacacctccgcatgccttgcgcggcttgcggccgcctatcgagggagaagactccccctttcttccgtcactctgagaggcctcccactgctcccgagtgagatggagcttcccgccaatggtgataggccccgagagaggctgtggctcatcatcgtcgacgaccttgaggcgacccaacgcctcctcaatcgacatcgtggagaggtccagcagagactcgatcgagcgagcgatctgcctgtacttctctgggacgcagtggaagagcttctcgacagctctctcctcgtcgtaggtgtcgtcgtcgcactgcaccatcttctgcaaaagattgttgagacggagggcaaagtcatcaacatccttacctggcttgaaggccaggttctcccactccttgcggagtgcctgcagcgtggacttgcgggcgcggtcgctgccgatgcgtgccgcagcgatagcgtcccaggcctccttggcagtccgcttctgggaaagcgagaactgcatctcgggcgggactgcagtgatgagggcatccagcgcccgtcgatctttgtcgtagtcgacgtcgccgtaccagactgcctcccacatgtgtcacacctggagcctcaccctcatcaccgcggcccactcgatgtagttggttttggtgagggtaggccaccctccgccgggaccaaagtccctgaccaccgtctgaacgccgtggtggccatggcgccggtcaggggagggagagccgcgctgcctgcgagggccgcgctctccgtcgaaccagccacctccaccgggagcgccacggccgcgcgcgcgctcagggctggcgctggcacgcctgcgcccgtctgggttcccgtcagcggccgtgcggtcccttgggtcaccgccgccgccgtgggggtgggctgctgcccaccgctcagccccgctcccgcgcccttcctcttgccagctcctcaaactccctgtcggcggtgatgtcaccggcgatggagccgttgatgctgctgcgcaaggactcaacctctgcctccgccgcacgtgccgcatcctccgccgcctctgcttccacctccgcgctggcagctgccaactccgctgctgccagtctggccaccctcgctgctgctgcagcggtctgagccgttgctcacctgcgctcttctgctgcggtgagctcgacgtcctactgacgccgagtgctcaaggcgaccgaacgccgagaccgaacgtcggacatggcgtgcctccggggggctgctgcgtggagaaggggaagggaaaggggaaggaggagcagcgggtgctgctgctgctgctggctgagagctcaaccgagcttggtaaggggtggaacacgagatgttttgcctacaggaaagtgtggctctgatactagatgttagaatttcaatggttactctcattgagaagaggatggcactagagatggggcaattttctggttttcttcattcacaaaacacaaagccataccttcccgagggaggttggatacatatatatatatagccatagctggctggatggctgctagctaattgctgcccacactagtctaaaatttgaacgtgatgctgtcctagagagcatccaaactaaataaagcataaaggagatgctagatactgtcctagggaagctaaaagcaaaaccgaaagatgctaaaagcaaaactgaaaggatgctgtcctaaaaggggaaaaacaacctaaaagcaagagaaggaccacaaggaccaaagaccacaaggcttattccatcaattaggacgctaaaggaatgcaacataccaacgaggagtatgattgtgatcctgtcatttctccgtggagggttgccatcattgccctacacgaaggaggatgttagcaatgttggtgcatcgattaactttgaaacaagaagcaaggatatgagtcaagtgttgtagtatctgaagaaaaaagaagcacaagacccaggtttctattacaagctcatgctagatgagaacaacaaagtcagaaatatgttctggacagatggcagatcgacagtgttgtatggtcaatatggtgattgtgtcagctttgatacaacttataagacaaacaaatatgacttgccgtttgctccatttgttgggatgacagaccatggaaacacatgtctttttgggtgtgcattcctaggagatgagacaactgagacatttaagtgggtttttgagacattcaggacagctatgagaggcaaagatcctattagcataataacagaccaagacagtgcaatgagatctgcaatagggcaagtgttcaagaaaaccaagcataggaactgcctatttcatatcaagaaaattgcagagagagaacaggtaacacattcactgacagtacaaagaaagatctatacaatgaatttgaagacattgttaacaattgtttgacagagcatgagtttgaaaccttgtgacacaaatgattgataaatatgagctgcacaatgtgaaatacttgcaatcaatttgggatacaagacaaagctgcatccctgtctattgcaagaatgactttttcccatttattcaaagcacaacgctaagtgaagggactaatgcaaggtttaaaagaggagttgggccaaggcatagtgttacaagcttcctaaaggaatatgacagaataaatgacactatatttgatacactgtattggaatgcctataactcaaacacaaaacaacccaaaaatctatggtcaggatactacatagaagagcaagcttcggagatgtacaatttaagcattttcaaaaagttccagcttgaattaaagaaatcaacaaggcttcaggtgacagtgcttgaacatggcaaagcatacttggtattcttggctctaaatcaaaaaagaaggaatggagagcaaggaattatgtagttctcacagacttacaaaatgatgagtactcctgtgtgtgtgcaaagttctcgaaggatggaatcctttgctcccatatcctgaaagtaatgttggacctaaatgttagcaaaattccgaacaaatacatcatagaaaggtggaggaagaaagacaacaacataacaggtctattcagaggagaatcaagtaatggacctaatgctatgctaatgtacaacgtgctctcgcaaaaaatgtcagaattagcatcaaagggttgtaagagaccagagatatatagttacctggttggagaagtggagaagttggatagcatagtggacagcatgattctagaagcccatggaaatcacacatgccaggtccaaagtaatgcaacaaacaacgctgttgttgaggggcaacaacatgggaatctgaatgatgaagaggaaattgaagacccagagcaagctaatacaaaaggcaggaaatcaataaggcagaaaagattggtggaaaagattatggataaagaatgcaaaaaatacaaaggcaagagtaaggggaagaataaaacattgatcttaacttttccacaaaattgtcgatttccagcaatacagctgataaaataaatataaatctgttgcaggtggccaaagtaatgagaatcagttgaagacaaagagaacaagtaatgttgcgcaaggtgggactgcttgtgagatgcaaccaaaaccaaagaggcggaagaaaggacaggaaaacaacaccaaagaaataataggtaaaaacagggcaagaaaaatatgtaactagaatgttctcatgtaatagttagggcaaaaaaagcatatatcttgttgagagagaagaacaagacatcatgtaacagtggatgttctatatatttagtactgagtttgacatcattgtacttggcatgaaccatttcaatatggttgctattttctaaacatggaaaatattatgtggcaatactggaagcctcctaagaacattgtaacctatacatttcaattctacagagcaaaaatccagaatcttcaaacttgatcacgtttgccagcacatgacaaatttccctacaataaatttataaacggtagaaaattagtacaaaaataactctacgatgcacaaagaatacttaggaaaagaaaaaaaaagcaataagagcttactttactggcccaactctgaaccaaatgttcagtctcagtttgtagcattttgtttttttcgttgaagaaaatcttattagcaagctgaatgcggattatgtcgatgtcacttttgtcaaactcattacacaatagagatcttggagaccagagttcgatggatttcatcacaaatataccagaatcagcactacagagaaaacaacattttaaaaaaagttcagatagataactaaaagaataatgttctcaatagaaaaaaaataacagtgcaaatgaactaacttgttttcttcgcgaggaacaggtgggaaaaatatctcaaaactgttgaaatccatagcactttcttcagcttcatctcaagcattttgtagattgcttatctgaaagaaacaatatttagagaacaatatatagctacacataaaagaaacaaaaatatattctaaaatctttgaaactacttgattgatataacaataaatgtatgacaccataccatcaaatccatgattggatcaaaatatggatcatccttttcatgcaaagaatcaagaaatacaagcatcctgtcttttatatccaccacaaaaaggaaccaatgctccaggtaacaaatgggaaagaaaagctgtaagccaaaatagtgtttagcatgtgtttgtacataaggggcatacaaagaaaaaaaatcaaactagataattaccaaatcgcatttgtgcaatattcttaccattgctgctccttggaaggatttctcaatttttgctagctctttagagttaagatgtgatattagcatgtcctagaaatatatagaaggcacaataaaaataaaaaagaattcaatttcaatatatatagggaaacatacagggggatatagaaaaaaatgaggtggaaaaaggaaaggataacttacaccaatggaaggaaaaaagtagttcttcttggatttggatggatggtttttgtgaaacaaggactggcaaaatgcagagatcacaaatccattaacatctcctccctttttcaaagaattgccgaagttgcaaaatgagatgcgaacattatcaatgttaacagcatcctcgctgcagaaaaagatataaaaagcttcattgagagaaagtaatacaacaaaaaaatataataaaaaagaacacacgaattgagaaaaacaaaaaaaaagaattaaattactcttgatattcactatctgacaagctacaaatagcattgtaatatctgtgtgcattgtctgatacaacaaaacgacgccttggacaaacaaatgggtcacttctgtgcttggcaggatgtataatcctccttggcccatacagaggcactttaccaccagaagagctaagtccagaattgttaatacaaggaatcgacgcatgagatgagtttgtcagctgcttagttgtattgcaaatgtcatttggtgagttctgggaaaaaaataacgcaaacaagttaagtgactatgaaagcagctaaaatactagagcaaaaagagaaagataatgttgtgaaagtttagtaaataactaaacattgataggtactatttaatggcgctgataagaatacagtggtggtgaagcaactatggaacttattgaaaatatatgaaaacacaccatcttttaaaaaaagagatgctctaaaaaatataaaaacaaagcagaatgtatatctaatggatatagttcactcacagttaaatcttggaatgttctcttcatgccaatttgagaggggttcagattagcatgtcttctataagtgttattgttcaatctggttcttgtaccaagtggtggagtcatataatcaggaccagcaaaagtggcaggcttcaataataaataacacgaattataatacaaaatatgaaatcacaaatataaatcaaaacaaaaaaaatatcaggaaacaaattggaaaaagaaaaaagactcacatttgcaggtgcttcattttctttgccatgtgtatgtgatttcaaagtatctggtgtgcaaacattctcgccaatattgtattcatggaaaatgtcaaatgcaagtttatcctcatcataaatgtgacctctgttgtcacggttgttaaattcagctaacctggacttaaactccatcgcaatttttgtaagaagagcaggtggttctgcacatgtagaaaaattaaattaggaaatcaagacatgaatacaaagaaatggcaaaaaatatacattagcaaaaaggaaaagggtgcagtacctttaattgattcactgccacaacttttagaatttggaggacacacagtaccaggagtacagaaagcttggcctggttataaatacagattaaaaatcatcataaagaaaaatggaagacattagataaatgtaacaaatcgaaaagataataagctattcatttaccttcacaacaacaatttaaactgccatcgctatgaacgatatttggagcctgcacaaaaagaatgttaattattgaaagcataacagtaaaaaaaatagctccaaaagattagtaaaaatgaaatactaacaaaaagaacggaatgcttacatcaataacattattgtctgctaaatcattagtcaagtgttccccgtgtccttgatcaagattggcatcaatatcaatatctgtaaaatggatatatgaatgtggtgatttgaaaatgaaagaaataaaaaaaatgtaaactagaatgattaatttgcaaaaaaaaaaaacaacctacttaccagcattcctatcagaagatgggtaatctttcccacaagattttggaatagcattttcagtaggtgtattagttctattttcagcagaagcattattgtacgcagcacgaacaaaatggctagcactagcatcaatcaaaatctgtaaagcactaatcaagacatcttcgcaagaattgttctttgcggcatgatttgctgaaaaatgagaatccatcaaatcagatatgctgtccttcaaatttgcaggcaaattgtctcctatagctgtatccaacttgttgcgaaatgattctgaattttgcacatgtacaggctacagtagaaaaaaataagaacaaaatttgatgatacaacacaaaaggacataaaaaataaagaaaaaaaaaccaaacagctatagtaacatgtaagaaaaaaaataccttatagtaacatgtatcagagaaatctttaagaggcctcggtccataattctcatcatcaatttcatctaaatcagagtaaatcttcaccatatcctgcttccaaacagctatacgaggaacatctttcggcacattttttgaaccaaagtcacgatgatcaagatacaaaatctataaaaaatatgaagaaatgaatgcataagcagcaagcacatcaataaaatttgaatccatgtagtaaaaaaagggaaacaatataataacttactgcccagatatataagcaaccaccaaagctattggtcttctgaaatttcttaacatagctcatcagccagtcatagacgaaacttgaccaatcaaaagaatgcaacatatcgacatcctcaaaaatatctagatactttatggatggacatgtggaagagttaggacagagaaaagtagctaaggcaacaatcagaaatgatataatgatgctgtcgtcggtcatatcttcattattaatcaactggtctccaaaaaaattcactgaaggcatgacagtttttccaaatttggataaaatgaattgtcttccatgttcatagtttttcccaaattctgaaccaccaattggaagatcaagaatagcatggacagcttctttgttgaccgggatcaccttgtcacccaacacaatctcagaagtctttaaatccacttttttcacaatccaagtcgcaattttttttggaataaagcttgagtcaaacaaaagcaaagaatgaaaaccaaaattcttaatcacaattttcttctcctcgggaagtttagacacaacttctgcaaaatatttagcagaaaatcttatgaatgatgtgtcagtcttcgaggcggcttttcctttatggatctacaaataaaaaaatagtaccacaattaaataacaacatacaaaaagaactagactccaagacaaaagatgacatacaaaattgttttctctaccttaggcttgtgtcgaacattcttagaagtactcactaattcctttttcatcttttgaatgacctacaaacaagtgaaaagtgatttaaaatcaaattagagaattcttacaacaataatgaaaaaatatagggaaaaaattttagagaacaagaggatcatacatccttcttgaaaagtgcatacaacattttatccaatttagtttcattgtgcgctcccttcttttttataccctggaagaaagacatacatacatgtattatacaacatgttataaaagaaaatagaatcatttattttttataataatatattccctaggagattgaaaaagaacaaataaaggaataacagtaccatataccttcttactgtaaagctcatgaagcatattgtcaaatccagatatattgagtgcttccaaaacctgcaaacaaaaatacaaacataatataatgcatttaccatagtttcaaaaaaaacagtgcactaacattactgacctcatcaatgtgataatcttcatctgaccctgtgcatgtgtcactttcagaatttatagagttaccctcagattcctcagatgagatgtcaattgttctacgtggcatctttcgtttgcaaataagtggcatctaaaaaaaatatgacatgcaaaaagtatgtaaggggaaaaataacttagcagcagataaggcatacaaaaaaaatactaaaaatgcatcatgctatctgctaacattaaaaagtacagagtacaaagtatgtacagaagtaaaaataaatcgtcaagcactattacaaaatataataattctttgtgtcctacctgtatacatgtacatgtgcataagggaaaataaaaaattcaattcaaatctaacaatagaaaaaatacatgattctaaagcacaaaactgtaaattggcacactgtaactaggttgtaactggactgtaattagtttgtaactaggttgtaagttatatgtaactggaatataattgaacttattttgcatagtgcaaccaaaaaaataacgctctgtgtagatgataattaatagtgactgttggcctacctatgaaggggattaagaacacacatgcagtagattaatatctcgtatgttgaaaacaaaataatatgcttctcataatttagaactgaccatcaaaaaccttaaccttaagtcccacacatttcagatccaccgaatagaggcatttatctaagtatatatcaaaaacagaaaacacagcacattgtgcaaagcattttttttcaaatccatcaaaaaaccccatttaagctaaatctcccaaatacaccgctgcacttaaaaatactgcacctatgattcaaaacaaaccgaaacctaaaaaagcaaaagtaaaaaaaatggaactgcatgccaccaaacaaatctgaacaaacatatcagaaatataagcaactgtgcatatctacaaaatattttgacaacctgaaactatatctacatttctgaaatataaacatgtattctgcaccgaagtgaccttggttttgctactgctgacacgcattagactgagttcatgcctaattatcttaagtttgccatagtctgagattttaaatgtacatgtcgactgaaactgtgcagtaccctgttcccaaaattcaaaaattcaaatagatttacgattgtgcagtcgtgtgatcccctgtccccaaattcaaaaataggccaattcaaacaggttaacaattgtgtagctgtgcaatcccctgttcccaagttaagaaacaacgccaactcaaaaggatttacgattgtgcagcaattaacagggaacagaaacacaaaacagaagaaaagcagtaggtgaatcaacagccataatttctcaaagcaacaggagccaagtattggcttgctgctaactcatttgaatcagcacagaagaattcagaacatgtatagaaacagaagaatccagaacatgtatagaaattttgtaaagcaaacaacacagcaggataccatctgaataattcggaagaaagcatgagcagaagtgcagaacacatgcagggaattgggtttaatttaactaaacaacttagaacatactgggacatacatctctgaaatgaaatgcttcaaatgtagaagaattcagacacaaacagggagttgggcaattaatcaaccaaacaacaggcagtatactagaaaaagttgcaacgaatgcagcattcagataaagttgcactaatgttttcccttctctattcaaatcacaccataatccaagcaaattgcaaccccaaacttgcacggttgcacccgatacaaattcatgaacaggaaaacatcgagcactgaaatgttgcaaaacctgcaaccagatctcttggactagaatcccaccattccaattaaccaaacgatcaagaacatactgctagatctgtccatgcatcactcaaacgaaaaatgcttgaaacacataagtcacataacatactaggggggatcaacccaaatgcatatctgaaacttttctgaacaaatgcttcagatgcaacgcagaacatacatactagggatcaatccaaatgggatgtctgcaaactatgcaaatatgtactgtgcagatctgcaataaatcaaattagcacgatacaatagaccatcagatctagtgaacataactaagaaagagcacacatatatcacggttcgccatgaagagaaagcattagcgcctccatccccagatccacgactatacatgcgggatgaaatcaacgaatcaaaccccctataaatctaggagaagaacaacaaccaaacctaaaacaatttatatggcaaacaccatgcgggatctaaacacaacatctaaaatgccccaaaaatgaaaccaaatcgagagcgaaaaaatcacctggaaattttagaagagagcaaggtaaaagcagatcagctacgggcacgatggacacgagtggatgaagagaagcacacaagcaagaaaaaccaccggcgccgagagcaggttctccgccggcggcgagaaaatcgtcgagagcggggtctccgcctcagcctccgcttgggtctcctccccaacgggaaatttctggaaaagaacagaactaacgcggcattatactgtttgaaaattaggaacagcgccaaacgggcagacaaagtggatttggatccaataacgaaatatcccagcacgaatcttggagccggatcgaacagccaacaaatcaacagtttttagcgctgaaaactgtcgacagataagtagcaaaaccgtatcctaatacaataaatctgcatatagctagtatagagtttttattgcattctcaaatctcaactgtaaaattggataagaagtagctatataactgccaatgggttgtactcgcagattgtatttgaagggtacaggggacgttgaaactagtgtatacacgagattgcgtcatgaaaataggagacaacggtttatactggatcaagccatctaaaaagctacggaatccgtcaactagaaagaatcctgtcgagtatcgctcaggttaacaccttgttgttaacgagatgtattgtccgctatggatcatttgattggaatgaaatttagaaccggtatacagcatcgagtctgcctggttgtcgcacacagttattgctgtagcagctcgaccacgacgtcaccaaactcaagctcgctaagaggctcaaatgagccggaccttggagggaatggaggccgcggcgacccatctctccctcgagcttctgcttatgcttcccttaagttgaagcacttcaccatatagcatcctcgagctctcccactttaccttctcggatctcgtgaaaattgatgggtttgggtctgagagatttagggatgtgtgcttatgacattcttggttcatccttgagttggcaatttctgtgagaatcagaaactccgagttgagaatggaacttgtgggcccgtcccacgtaaactaatgtagtattggatggcatatttcctattacaacgaatttgatcatacttctattcggatttgttatactagaaaacatcatatccaatactagtctggtttttagggaccttgagatttattccaaatccaaattatacaaaagaaaacaaaagcgaatccaaaacttcattggaaatactgtgttttccctctcatcccaccgtatcctaaaacctatcagaattcgaactatgtaaaaaattaaagcaattttacgatcatttaggaggtaccatgaggtaccactttttatattgtaaatttgatatctcctggtacttaagtactacgaggtaccaaattttacactaaaattttgtacctcatggtaccttcacagggattgcaaaattgctcaaaaaattattatcaatctcagtcaaaagcttatcactcggattcttggagtttctatggattggaacatcaaattcaaagctcagatattcatccaaatacccccaatatgcccattcaatcaatttccttttctaacatgtgtccctggcaatatgtgggacccgctccttagcccgcttacacaaggtccattgactcatggaccacaggctgatgggtcgtcccaagcggttctcacttccagcccacctagtacttccatccatctcatgcctattaaactgtaggaaagagtacacgcaaggtccctcaacttgttagctagatacagaatcgtccctcaaccgcaaaaccggacatccggcgtcccccaacttacaaaaccagtcacaataggtccctcggtggttttgaccccgattttgtcccacgtggcagctggctcagcgtgggacccacgtgggccccacatgtcaggctgccacatcagcctcctcctcctctctctctctcttcccctcttctctcccttcctcatctctctctctcccttctctgactcaaccggcgggaagaggagggcgtcggcggccggcgacgggtgacgcgacggcggtgatggtggcgacgggtgatgcggcaatggtgggggaggagctacgggcgggtgggcggcggggagaggcgacgcgcaggcggcggggaggggcagcgcgcggatgggcggcagggaggggcagcgcgcaggcggcgaggagtagcgcgcagacggcggggggaggagcggcgcgcgggttcccccgccggctgccggccacaaggcccacgaggcagaggaacgacggcgatgattcggcggcgggcgacacggcatcggcctcgtcggaggcaagcgcggcggccctaccctcctcgaccgtgcggcgcgtgcggccgccggggcacacgaagagggcccccgccgtgccgtcgaagtcgggcgtggagacggtgaggtgggcggcggcggcggcggcggcgggggtgtgaatgggaacggcagtcagcgggggaaggggaggggagcgaatcgagggcggcgagggagaccgggacaggaaggggagcgccgccgttggagaaggccggcgaggcagtggcgcgcgaagccggcggcacggagcgggacggggcggtggcgaacgacgacgacgacgatggcgacatgttcgaggaggaggaggacgcgcgcaactcctccctcgccgcggccgcacgcgcgatcgaggagggtggggccgccgcgctcgcctccgacgaggccgatgccgtgtcgcccgccgccgtatcgtcgccgccgttcctctgcctcgtgggccttgtggccggcggccggcgggggagaccgcgcgccgctcctccccccgccatccgcgcgctgctcctcgccgcctgcgcgccgcccctcctcgtcgcccgtccgcgcgctgcccctccccgccgcctgcgcgccgcctctccctgccgcccgcccacccgtagctcctccccccaccactgccgcgtcgcccgtcgccgccatcaccgccgtcgcgtcacccgtcgccggctgccgacgccctcctcctcccgccggttgagtcagagaagggagagagagagagagatgaggaagggagagaagatgggaagagagagagagagagaggaggaggaggctgatgtggcagcctgacatgtggggcccacgtgggtcccacgctgagtcagccgccacgtgggataaaaccggggtcaaaaccgtcgagggacctattgtgaccggttttgtaagttgggggacgccggatgtccggttttgcggttgagggacgattttgtatctggctaacaagttgagggaccttgcgtgtactttttcctaaactgtatgctaaaagctaaattggtaatcaacaacttactaatattttttccctctttctttttcctccatgtcataaaaaatcataggtgacatcttctccttagacactaacggtacgcaagtgtccatatccttacatttccttacagcatattgagtaataagtagcaaatgaataaacaccaatcaactagtggcaaacgagtaattttatctttcatattactcccctcaaaaatatatttagccaatgtgataatacttttcgagacaaatctatttatatcatttgatttggctgtaaactaagcattcgagaaatcatcgatggccgaaatcttaaaggataaatatattgtttttatcggagggagtattcctctacgatcttttgagacgtccggtgttcatgctcatcaatttcgcttacggagtagtactgaacaaaaatagagacaacggtattttattacggacgatctaggacaagaaaaccccccggcgccctccctgccacggcgcaccgcactgctaccgaccgacgggtgcacggcgcggacagcagcagcaacgtgagttcgtggtcgtggaccacccaccgaaagcgacgtctcaccagcacacacacacaccaccacgtcagtcggttgccccttccctttttacccatcacctcactccaccttcttctcacgcagccgcagcctccgacccccatgtgcgttcgttcgtttcgcgcgcgcaactgtgaagccgagccagacaaattaaaaacaagaatacaaaaacagacaaattaaaaaacaagaatacactcaaaaaccaaacacggttgagaacttcagatacatccatctaggtaagcgacggagaagccgaagccgatgcgttcgcttcacctgcctcgtcttcttctcctcctcctccgaagatcttgacggtcggccagttattatcactgcccgcttcttgcttcttgcagacttgcagttgagttaattactgcggctgtgcaggagaaatggcgtgttttggtgggaggagtatatccaaagtttggatctaaaacttcagtccttctccatcatattaatctatcatagtatactagttgctgctcctcgctgcttctgcgtctcctccacgagaccacgaccgacgcccccacatgggtctcatggtggtgtgagctgagctgcttgctgctcaagtggtgagaaggtagagagagagagagagagagagagctgagctgcaagaaaggctcacccatcgaggacaccaaaacaagtcaagaacgaacgactcgtgatccgtccatgggttgctctcctgtcaggcgcatgagattctgaggcggaggaagaggagagaaaggaggaagaagagcaagatagcggcggcggcgatgagctggaggaaaggaggaggaggggatggaggggtgtcgaggagatgggccgtgctgctctgcctcgggagcttctgcctcggcctgctcttcaccaacaggtaatcaatcaagagaatcccccctgctctccgattcttgctctcttcaattttcgaggatttgagctcagcttcgctagtgctgggtcgttgatttgagctgcgccgagctcaaagatctgtgccatttgacgcgcctctgcatctggggtgattggggggtctggattactgtgtggccatgaattcgtgttcttgatttttgcagcggaatactgtaaattggtaggagtgttcgtgttcttgctttcacgggggttgtttggtgatttggtttacctcgattacatcgaattggagtgtcaacgctctctgaacctcgaatttattacttaccgcattagattattggcttcacaagctgtgcaaatgatcccatttgaaatatgcacataatttgcttcctagacgagtttctgctaactggtgtatcctcacccaacattttagctttagcactccactcttcagtcacttccttctgcagaagcatgaccacattttgtggatgtctagttccattttcgcaaattcagctagtcttttcgcccattatgatgttattattacaatgatggtaggttaaaaagctgggccgaaagacctcccccgaggtatttcgtttaccaaatgtttcttacctattccccatcaattgtttcagaatgtggacactgcctgaggcaaacgagattgctcgaccaaacggaaatggagacgaaggcaacacgctagttgccgcggagtgtggtcctaaaaaggtaatgcttttcttcccattttaatttctctaattttattcaacactttattagtccagttcattacatgaagttagttttatagaagatgatactttctttctattgtaatgcagtgtatagagtaattgtcaatatctttagctgattatcatgtgtttgttagcaggtccaacatcccgattacaaagatatattgcgggttcaagatactcatcatggtgtacagtacgtacaggccttgtctttcttgagaatatttttgtttgcttgttgattttttttttttagttctgatcggtatttttggatgctttgaatgtagaacactagataagacaatagcaagcttagagacagaactctcagctgcaagatctctacaagagtccttgctcaatggttccccagttgcagaagagttcaaactttccgagtcaatcgggaggcggaagtaccttatggtgatcggcatcaatactgcatttagcagtcggaagagaagagattccatacgttacacctggatgcctcaaggttgttgacattaaaatctggaatatgtgtttcattaagaaaaatctgtttattccatcgcaaaaaagtgaaggacagtacttttgttcccctgctgaaaagaaaaggaacagtacttctatagttttattggcatgactcgataaactaacagacaaaaaacaggtgaaaaaaggaagaagcttgaagaagagaaggggatcatcattcgtttcgtcattggccacaggtacaaagaacgtgttgcatttttcagtactcagtagtcatggttccttattttgattttggtttctgttattgacaaaacaactcactcattccatgtcttccagtgctatatcaggtggaattgttgatagagcaattgaagcagaggacagaaaacatggtgacttcatgagaattgtaagacaagcacttgcttaattgcttattggtttttcatggatcgtatttatcaagtgactgtttctcctagaatcactgggaatgctatttcgcccccttatttattgtggtctaactttattcaggatcatgttgaaggataccttgcactatctggcaaaaccaagacatactttgctacggctgtttcattgtgggatgcagacttttatgtgaaggttgatgatgacgtgcatgtaaacataggtaaatctccatatcttttatgcccttctattgttcttttttgaacattttatcgatcttaagatgagaggaaagtgatcatatctgtgtgccgccatcatgtctgtatttgaagcttctctttgactcattgatggtcatcttaagtgtccattttgtatgtgtagaaacattaaccagggtttcaaatatttcgcaagataacacgcagctagtctcatcaatgcatatttgattcattgcatgtagaaagggcatcactgctatagacaattgattctttatgacattggtgttttgcttttgcagcaacacttggacagattttatctaatcatgcattgaagcccagagtatatattggatgcatgaaatctggacctgtcctaactgagaagtaagtgcatcacatggttttaactgttctttctgacaatgtctcctttccttttctcatgccctcaaaatttgctaagttttgttaacccttgtctccaggggtgtgagatactatgaacctgagcattggaaatttggcgaaccaggaaacaaatattttcggcatgctactggtcaattgtatgctatttcaaaagatctagcaacctacatatctataaacaggtgagataacacctgttttcatatttacctgtgtgcacatgcacgccttgttctcattgttgcacaaactaatgctgattcctctaatccaattgctagacatgtcctccacaagtatataaatgaggatgtttcattaggaagttggtttattggattagatgtcgagcatatcgacgaccggagactttgttgtggtactccgcctggtaagctccctacctcctatcttgcatttattatctgaagcttctcttcatacctagcaataccaaccggacgaacaacgtaaacatttgaaccgagtcacattttcgtgtcgtcgatcacagattgcgagtggaaagctcaggcggggaacacctgcgccgcgtcattcgactggagatgcagcggcatatgcaactcggaggggaggatctgggaggtgcacaataagtgcgccgaaggggagaaggcgctttggaacgcaaccttctagcgtgaccgaaacaaccggtcaaacaaaaaaaaggaaaaaaccggaagcacaagcaggaacttcctcctgcttatagtaggtgtgctgtacattggccacggtctgtttgtatgtaattcttgtgtagtttttagctgtgatgattcgtttctgtaactgggtctggatgaacaccgacgaagcggaccacaattttacgtagcgtctgtctgccggtggcggtgaaggaggtgggtataccagctgatattgcattctttggagaagaggtaaaatgtttttgagttttttgaggtggtcattttgtatcgatctcctgtactgtatactgtatatggctgccatgatgtatgaccaaaataaaacttacctgatgatgcttcatttcgatgactagtatagtagtatactaagatcactctttttttcttgtcatactgctgagagtaacaattcagggcatgtttggtttggtgccattttcaacctcacaaaattttgacattattaaattttggttagaccaaattaaacacactttaaccattactatcttaccaaattccaaaatttggcagttctacgaactatctcttaaaactctaccaaatattgacaaacgcaacaaataaaacaaagacaacgctatcaaattttgataatgccacaatgtgtcaaaatttggtatggttgatttgagcaacaaagtaaacaagccctcagtctctctgccatcatcggaattcaaacatgggttaaaacattatgaattcgcgctgaatttttaccaaactgcaaaccatcaaacactggcattccatttccatacactcttgtgactttaaaattctctcgacgataaaccgatagacacgtgagtgggcccacttgtcagtgacatagtgttatcattcgtgtaccaatttgctgtgcgcgcgtcgtggtttcatctccctctttttccagtttccctcccatttcgttcccgccatagttttccctccactactcgcttccccccgcctccttcccctataattatctccgccgccgccgccgccggatcccttcctcgctccctcccagctatctccggcgatggagcgacgccgcctccaccgcgccgcgccgcgagaggaggagcggatgcaccggttcctccgcccgggggcgctcgcgcggctcagggactcgaggatcgtcgcccgctggctccggtcggccgcggcggcgacgcgcctcctgccgacgtccctccctccggcgccgacgccgccgcaggtggtggccgagcagcagcagggcggcgcgccgcacttcgtcgtgccggcgagggggctcggcggcgcggggaggtacccgctcaggaggaggatgtgcgcggccaggagcgtcgtgttcctgccgccgccggccgcggatgcgttcttcgccgcgttcgcggcggcgccgccgccgccggcggatcttgtcagctaataaggatttgggcgtgtactgcgatttgtgtagatggttcgcgtgttcttggttttggttgatactagtaatcaggatttcgagtaggaaaaataacaagatttcgatctttattgtgttctcggctgaattgcagattgtgaattatcccaatccaaatgacaattctcataatgattacacctggcgcgattagatctgtgaattgcttgggtattcatagtgctgagtgctgaccagttcatcttccatctccctccaattcggcatttttgtcgggaaggttcataaaaaataaataaatttgtgcatgccttcctccaccataataagataagtaatcaagtggtcatgcagatggtataattgagatcaaccaggtgcgcatttgaaatgtacaaagagctcacaaatcctccatatcgaccatcacgacgaaatgttatctctgaacttttggacaatgtagcatcacattcacatttcattttgttacatccgatgctaatcctgggaactagtaggcaagataccgttggaacagaagtttgatttcttgtgcccttttacatggaaaccggccgtgacaatctgacctactttgactgatcatcatcatccttgctcctctgattgacagatcacaaaactcacaaatcgtactcatgcatcatcaatcaatcagtacaaaattcacaacgttaatatccctttttctgatactgttccctcctctttccttgtatgtatgcgttctcgtctatataaatcctacacgttgcacatgacacgtacgggctcgtcggcggcgatggcgaaggcggcggcggagatggacgtcggcggcggcgaggggaggaggtggaagcggacgcgggggcggcagaggatcgagatgaagctgatcgagaacaaggaggcgcggcaggtgtgcttctccaagcgccgcgagggagtcttcaagaaggccagcgagctgtccgtgctctgcggcgcgcgcgtcgccgtcgtcttcttctcccccgccgggaggccgcactgcttcggccacccctccgtctccgccgtcgccgaccgcttcctcctcggccgctcccccgccgacgccgcggcggcggcggcggaggaggaggaggcggtcgtgcgcgagttcaaccgcgtggaggagcgcctgaaggacgcgctcggcgcggcggcgcgcaggcgggacgcgctcgacgaggcggcgcgcgtggcgggcgtctggaacgacgccgacgtgcgccgcgcggggctcgccgacctcgtgtccatgctcgccgcgctccagagggtccaggccgaggcgtcggagcgcgtccacgacatcatcgtcgaggaggcgatgacacactacacgggcgccgccgccgccgccgccaacctcatcgactacctcgacgccggcccgttagtctctcacagccccgggagccacgacaccacgacgaagttgatcggcggcaacgctgtccatgcgccgccgttgtccttcccgccgatgataatgccgccgcctctccccccgcagttcagccatggatttgggtacactgacctcgccgccggctacggctacaaccttgaccacggccatggcgccgcctatgaaacggaagaatttcacaacgcggcagcatgcgacttcttttaaccagtgaaatttcattaggttttgattgataattaatctatctaatgttaattagtaagctgtttaaattacaattaaagcggccagtgtgtgtaattatgtgggggtggaaacaaagctgttagcgatattatcgcttgcggtgtttatctctttctgttttatccgatctctcctcctaatcctcccgattctgttgttataagtcggttgagtggttaaggtatggatgaggtctatatgtatacatgttccgtgattaatgaaatcatcgcgttgagctaatctcgctttcatggtatcagatacctccgatctaatcgcttccgctccaccctaaacctttctcctgccgccgccggctcacccttacgccggccctcatgtcgtctcacgacaacgccgctctctccgcggcgattacctccgtaaccaacgccgctacgtctgccatccgaaagacgctccgtcctgccgatgacacagtctctgcggatgatcgtgccgccgccgaggcccttgctgacgccacttctgctgctgctgtcaaggccgtccaggacgccatctctgccctcgtcgtctcgtcgtctgccacggcaaacacagcgtcgagcccgtcttccccgaccacggtgactgtcgacgcatcggcgcttcgcgccgccctcggtgttcctcaacccgacgcgccctcttccgctggcgcgcccgtcgaccgccccgaacccgacctgtcaagtctcttcgcagcgctcggtgttccgcctcctcaccagcatgacgagcaacccgccggcgccgcgtccggtggcgcgccgctcgtcgacgacaccgttgatgcactccacgctcaagctgtgtcggtcctcaacgttaaggctcttgttccagtcgtcctcgacctcggcgcggcgaactactctaagtggcgcggcctcttcctcgtcacgctcggccaatatgccctctccgatcacgttctctccgacgtcgccttccccgaccaagcgacacgggcacggatggactgcgtggtgctggcatggatttatggcaccatagctgccgatctcctggagaccgtgctgcagcccgtcgccactgcacgccatgtgtggctctgccttgagcagatgttcctcggtcaccgagaacaacgcgccatgcacgtctcgacggaattccacaacttcgtgcaaggtgacctcagcgccaacgactactgtcgtcgcctcaaggccatggctgacacccgcggcgagctcggcgaccccgtcaccgaccggcaactcgtcctcgccatgcttcaaggtctcaaccctaagtatgaacacttgcaaacaattattcccttgtagcgaccgtttccgtcgttcgtcgaggcccgcagccagctcatcctcgccgagatcaacaaaggtaacaagggatcctctgctccatctaccgccctgatcgccgccaccggcggcaaccgcggcaccggcggcatgaacccggcgcatgccacgggtttcgacaacccaaaccagaccagccaaggcggcggcggaaataaaggcggcggcggcggcaacaatcgaaaccgacgccctcgcaacaactccggcggcaactccaacaactctagcggcggcggcggtggttcacaagcgtctcaaggcggcctccagatcgtgcaagcccagggaccaagccagccacatgctcctcaaggctggcccacacctcagcacccatgggccggcaccatccagatgtggcccggtggcccacttctgcgctcccctggcatcctcggcccacgacctcagttcgcaggagcggcactcgctgggccttctgccggcctcccgcaacaggcctccagcgcccagccagccagcttctacaaccaggccggccttcttccgacgccttcgccacagcagtcggcccagccttcggcctggtacggcgctaccggcccgacgcctgcttgggaccagcaaacccttgctggtttgttccaaacaggaaccctcacgacgcccgcctccactgaccggtacatggacaccggtgctacttcacatatgacttcggacaccgatatcctatcctctcccacctacccaactcactctaccccctcacacattattgttggaaacggttccctcctgcccatcactgcaaccggcgatgcctcttttttttatgccaaccgaatatttcttcttaataatgatcttgtttctcctggcattataaagaatctcatttctgttcatcggtttgtcactgacaacaatctttccatcgagtttgacaagtttggtttcactgtgaaggatctttctaccaggaccgtggtcgccaggtgcaatagtttcggtgacctttactcctttccggcgaacttcttcaacaccatggccagctcctttgccgccagcaccaccacactttggcatcgtcggcttggacacctcggtcacgaggctcttgctcgcttggcccactcctcggtcattccttcacccaaaggcggctcctccaccatatgtcatgcttgtcagcttggtcgtcacattcgtttaccctttactacattgttttctagggctaagggaaactttgagttaatccattgtgatctgtggacctctcctgttcccagtgtgtcgggttttaaatattacctagtcattcttgatgattgctctcactatgtttggacgtttcctctacgtttgaaatccgacacttttaccacactttctcatttttttgcctatgtcaggactcagttttccacaccgattcgcagcattcaatgtgacaatggccgtgagttcgacaactccgccgcccgtaccttcttcctcactaacggcgtcaccatgcgcatgtcctgcccccacacctctccccaaaatggtaaagccgagcgcactctccgttccctcaacaacattgtacgctcgcttctctttcaagccaacctccctggctccttttgggtcgaggccctctacaccgctacctatctcatgaaccgccaccccactaaaactctccaacgccacactccctactttgccctccatggtgtccacccgtcttacacacatcttcgggttttcggttgccgttgttatcctaacctatccgccaccacacccaacaaactacccccccccccgctccaccatgtgtatctttcttggataccccagcgatcacaagggataccggtgttttgatcccattactaacagggttattatttctcggtatgtcgtgtttgatgagaacacgttcccctttgctgagaactctactgttgacacatgtactactgatctcttcttcttggatgattttactgctccagtacaggcgccgatcggctccggcaggcccagtggcgcgcggcctgggccctctccctccactcggctgcttggtgggccctccactacaccgcctggaccaccgcctgctctgcccactagcccacggcctgcgaactctccggctgtctctgggccaccctctactccaacaccgacaaggttggcctagcacacggcgctccaggacttccccagcacctcggccacctcggtcgacctcatcgatgctgggccgcgcgctcccccaagcacggccacgtcgccccatgacggatcttctagcgcttcatcaccgtttctaccgccgctcatgattccgacccgcgcaaggagtgcgcgcgttcctcttccacgcccgctcatcaccggcttcggcaagtctccggttgacaacgaccacggcatgaccaccagaggcaaggctggtgtaccggtacccactacacgtatgaaccttcaagccgctaccctgtctccgatcccgcgcacctaccgtgccgcgctcgctgacaccaactggcgagacgccatgcaagaggagtactcggcgttgatggccaaccgcacttgggatcttgtccctcctccaccaggcgccaacattgtcaccggcaagtggatttttcgacataagttccacgccgatggcagtctggaccgctacaaggctcgctgggtacttcgcggtttctcgcaacgccccggcattgacttcgacgagaccttcagccccgtcgtcaagccggccacagttcgcaccgtcctcaatctcgccgtctcccgcggctggcccattcatcagcttgatgtgaagaatgccttcttgcatggtaccctggccgaggcagtttactgcatccagccatctggtttcgtcaacactgcccaccccaactccgtctgccgcctcaacaagtccctctatggtctcaagcaagcgccacgggcttggtacaatcgctttgctaccttcttgcaatccattggtttcattgaggccaagtcggccacgtctctcttcatctatagacgtgacagcgatgtgatatatcttctgctttatgtcgacgacattgttcttactgcctcgtccacctcgctccggcgctagaccatctcatctatgcagacagagttctccatgaaggatcttggcgagcttcatcactttctcggtgtttcagtctctcgtcagtcctcagggttgtttctctcacagcggcagtattgcttggagatcttggagcgcgctggcatgacagattgcaagccctgcaacacccctgttgatactacctccaagctatcctccacagatggttccccagttgcagatcccaaagactaccgcagccttgcgggtgcattgcagtatctgaccttcactcgccctaacatacagtatgttgttcagtagatctgtctacacatgcatgaccctcgcgagactcatctcaccgctctcaagaggatcttacgctatgttcgcgacactacagatcttggactacacatccgccagtcttcttctcatgacttggtggcctattctgatgtggactgggctggctgtccagacacacgcaagtccacctcgggctacgctgtgttcttgggagacaacctagtctcctagtcctccaagcgtcagaacactgtctctcgttccagtgctgaggctgagtaccgagctgttgcaaatgccgtcgctgagacctgttggctgcgccaactcttgaccgagctgcatgccccgccagtccgagatactcttgtgtattgcgacaatgtcagtgcagtgtatctctcaactaatccagtgcagcatcaacgcacgaaacatgttgagattgatttacattttgtgcgcgagaaggtcgccattggatctgtgcgagttctacatgtgccaaccacatcccaatacgccgacatcttcaccaaggggttgccaactcctgtgttcacggagttccggtccagcctgaacgttcgctctaacaacgttccggctgcggggaggtgttagcgatattatcgcttgcggtgtttatgtctttctgtttcatccgatctctcgtcctaatcctcccgattctattgctataagtcggttgagtggttaaggtatggatgaggtctatatgtatacatgttccgtgattaatgaaatcatcgcgttgagctaatctcgctttcaaaagcggtctaccagattacgccttcgcttttgaaatacgtatttgcggacgagatgagcgtttgcaatttccatggcgccgccgccgtcgccgccgcacgccgcggcgcttccggcgtgggcggcggagaacgcgctcttccgccgccaccgccgcctccgcccgctcctcctccccgccgcttccctccgcgccttcgctcctcttctctcccactgcatcgtctccggcctcgcgcgcaaccccttcgtcgcctcgcgcctcctcgtcgcctcctcgcgcctctccctccggttctccctcctgctcctctcccacctccccgcctcctccctctcgcccttctccttcaactccctcatccgcgcctcgcctccccgtctcgccctccagctgttcgaccaaatgcgccaccgaggcgttaccacggatcgttacacgctcccgttcttgatccatgcctgttcttccggtgatcgtcctctctgcgaatccctgcacgggcaaagcctccgccttggttacagttccgtgctcttcacgcagacggcgctgatgaacgcctactttgcttgccggtttgaggttgccgctcgcagggtgtttgatgaaatgcaggcgaaggatgtggttgcatggacgggcatggtgtcgggatacgtggactctgggatgttccttcgaggtgtcgaggtatttcaggagatgagaagctgcgaggaggctgttaggcctaatgtggcaacggttgtgtcggttgcttctgcgtgtgctggactgggctccctggagtatgccaaagggttgcatgcatatgtggagaaggtggggttggaaggagagttgattgtgaagaattcgttgatcgatatgtatggaaagtgtggcagcattgagttagctcgtggcttgtttggtttgatgcctcagaaggacctgcattcatggacggccatgatttcagggttggcttctcatggccatggcaaagaggcagttgctttattctttagcatgaaagaggcgggagtattgccagattcgactacctttgttgtggttctttctgcctgtagccatgctggattggtggatgagggaatatctatcttcaattccatggagaatgagtacaaggtcacccctgatatcaagcattacggttgcatggtagatcttttcagcagggcagggcttattgcacgtggttatcagtttattgaaagcatgccttttgagccaaacttggcaattctcggggcattattgagtgcttgcagtatcaacaatgaattggatattggggaactagtgatcaagaggattgagtctgttcgctcagataaaggaggtgctggtgtgcttctgtccaacatttatgctaaccaaaacctgtggcatgaagttgattctcttagaaggaagataagagatgacactatttgcagaaagccacctggccagagtgtgattacatcagatgtttctttcatggcttcttgagcagggtttcaacacatccactctcaatgtagcttctctcattattgggcaggtaaggtaactagtgatttttctaaaagtatatataacctggagcatattggataatttgtcatcttcgatttgtttcaagattcttatggtttgactgttaagagagaaatgaatgttaagttgcttaattaaatactagccctgttctacaaacttgaatttgagtgtagtgattggttaattagtaccttgatccatgtaaggcacccttgtattgataagtaattaatgttaactttggaacggacaggtttaattgccataatcttctgtacttcgatagagataacaagacaaaattcttctaacaacttagggaggagttgtcaagcttgatataggtgtacctaccttccttgatcatcatcaacaagctctggtggtacttggtgaaccctaagatcgtagctgcaccgttttacatgttcgattatttcatgtgtttagtattgtattatgctcctgagcttttacttagctagtctcccaagtacttcaatatttttggtattggtttgaaaacgcatttggttacctagtatctccaatcgcttatcaattcccagtctattttgcttcaaatgcagatccgataacaaaacctacctcactgatccgccattgccgtcgctcttgattggcaaacgacacatttctgaagcagcatggaagcacatcaacttccccttctgtgttggaagaacaagaaatatgccagcttattcagtctccgtccaaaagctagtgcatactagagcgcctctactcccaggtgataatgctttcttgcagaaatactaccatgcataaattgttgacaaattgcaatgctggtgtttatgcattcagcaaagcgtgtgggggccggatgatgtcagtgaaagcttatttgctcctgcaagacccacccacatgccactcacgaaagaaatcaagggaggaatgtcagcggcagagaggcgcagaatcttacttttcaccggcaagtagttttgttggttattttggtcgtcaacactaatggctggtttttgcttactagtatatgatttggactcttgttggttgatgccggatggatggtgattggggtaaaggagcagctaccctggccctgcaacttccaccataacaaacatgagtagaggcagagcttccatgggttcttgggagaagcttctcttgtgcatgcactgaaccaacaagcatatcatatcggcttatatattattctcctgtaactttccagaatcttatctaacctggatatcacaacactgggcatatatctctttctccatgttgtggcaaaggaatctggggcaaggaaaagaagggagcaagttggggcctgtttagttcccaaacaaaatttttcacgtcgtcacatcgaatgtttggattttttacgttgtcacattgaatgtttgtacatatgcatgaagtattaaatgcagaaaagaaaaaccaattacacagttcataaggaaattgcgagacgaatcttttaagtctaattgcgtcatgatttgacaatgtggtgttacagtaaacatttgctaatgacaaattaattaggcttaataaattcatctcgcagttttctggcggaatctgtaatttgttttgttattagattacgtttaatactttaaatgtgtccgtatgtctgatgtgatatgtaggggtaaatttttttttttaccactaaacaagcccgtggaaaagctagcaaaggcgcacgcaacgcaaggcctctctgctcggctttgcttcctcgcgtgggaggctcggattcgcctgccacttgaccggccggcaccccaccgaggtgtgtgtgtacaggttggctgggttccctcccgtgtgcgtgtggtggtgcggctcttcgcgttgacatagagcctttattcttttccccgcaacctttcctcttgaaaaagaaaagcgcaggagatcttctaaaaaaaagttttgccttatttagtgacagacacgtatctagattttttaaaagaaaataatgaattatcattcgatctttgctactcagggggaaatccacgagaaatagtttgcgacactaagtgtagattgcaatactgatctggaggaaagagctaaagagaacctaagcaggcgcgggcgggcgacgattttatcaccaggttgcagcacacgtctcaagacaaaagcgtcgggcatgagagagatgctgcagcatggggtcaatgctgcatttttttttaataatgatgtgaagtgtgtagggcccaacaatacaatgtatgtacgagctacaaagtgagttatagatgaactggtataaatataattggagccaactgactactttattattgaccctgctctaaatagtgatgatctaacccccttccccccaaacaaaattcttcctctctctccttgcactcatattagatctgctattgtttgctacacacatgtaaatttattagtgaaacattactcgagtgacatatatatagtagggcatgttttgtgaggtctgaatgagtgtttctatgtttgttttttcaacttttaaatctcgaatcgtttatttaagagggcaaatgggtagtctttgttgcaatgtacacatgctcaatcaaataatgcacaatttgcatggcatgacataaaacataaaacacagagagagatatgaagtggtcatgcatttttagggataagagagtgtggttcacatgtcagtgacagagatgaagtgtgttgaattggtctgtcaatttttaaattgtgaatctgacttgaatcttgaagaaatatttctccgtggggatcaaccaatttttaccgatctcgaaaccaaacaaatctgaaaaagtactctcttcgttctagaaataaactcaacctaagagagattcatatttcgttgttagattttttttttgtcaggacggacggaagggagtatgtttgatgtgaccttctattccatcccagaaaaaaacaaatttgagctatgaacctggacacacatatgttaacctattgatccaaacacatgtttatcgtggagtgccacagcctccctcgcggcgcacggacgcggcctcctcgtgtctcgccgcgaccaacctgccctctttttggccttcagatccgtctcggatcgcctcgccgctctcgttcgtatctctcctcgcgcgtctcctcctcttcttctcccccacgatttcgttcgtctgcccggacagcaccccggatccctcgccccgcgccgcctcctcctcgtaagtctcgctcttccattccccccctctcctttctccctttcggatgttcgcggaacgcctcctccttccattgattctcgacagaggacaagaaccttccttcgtgtcggcttcttcttcttcttctttgctctgctgttcgtcgtagcttcgctcgtagccggggggttcgtcgggagggattctctggtaggtcataggtgggtgcgaaggtttacgccgcgtgcagcgtccggttcttgcctgccttcctgcgctttggcatcagatgcggcaggagatggtcggtcggtcacctgtgaacgctcttcgtttcgccatttctgatagatatattgcggggttccttttccttgtgtttggttctctagcttcttctctcttcctgattgaggaggagaaatggtgataagcaccgtttagataaagattagaaacctgtactagttcctaaagtgtcttctttatggggatttgatttcaattgattagcggatcatgtatctatctacccatgtaatataattatttttttttgttcatcatgtttactacttgatgcttatctaaaaataatgtttttactttcctgatgctttaaccacagcatcttcttcattgattggaatggattctgcctctagtaatttgcatttgctgtccttcatactgtcaatttaatgtgatggcagtgattattacaagcgctacttttgcaattcatttcttctgacgagtgatttttttttttaaatggtttctagctgagctggaatggaaggtgttgttgtgaggagggtgatcccttcggacaacagttgcctcttcaatgctgttgggtatgatttctcaatcatggtgctatctatatattattgatggttttgcaaatggagcggttgccgattataccttctttgatacaggtatgtcatggagcataacaggaacaaggcttctgagctcagacaggtatctgctttgaaagactaatgtacctgcatatatgtcttccctctcactcttcaaggtttttagaggctctgatgttgtaaaaaatgatatacatccccctcgtatttttgcaaactcgaaccaaagctatcatcatgcttgctagaaacttcgtgttctataatatgtttatagtatttggtatcaaacgtttgtatatgctccaaagtcattttctgccaaaaccagttgtactatcatgtgtggctgcattaattggaatagatggaatgatattgttagcttggcaatgatattgatctatcatatagatgagctactggccttaattcaattcgtgtgataaacttctttgaggaactcttacatggcatgcactgataactatggaattcagttagatccattggcatatctgttactcaagcgttattttgtcaactgtactagtaatgtttgtaatttattttaaaaaactgtatgcgggagtattgatgttcagctgctgtgttgaattcttaccccttcctcaataagtagctatgttactatactttgtttaataccatcttttggtagaagaaaagaataaatttaatagatagtgtattagctcaggtatgataaaggcaccaatacgcatgtgatgatgtcgatttaagctaggcttacaattattgccttactgctgcaaaattcagtatggttgacattgcgtttttctccctcttttcttgaaggttatagcagcagcagttgctagtgatcctgcaaagtacagtgaagtttttcttggaaaaccaaatgaagcgtactgtgcttggattttggattctgaaaagtggggaggtgagcttttgcaccactaatcatgcacagcaacaaggctgaaaaacaacctcaatggaaaccgttcatgctatgttgtttatccatggattttgacatacagtcatgcaccacattttgttgcatcaatgctctaaaatttgtgttaaaacatccctttttcgcaagaggaataatgcaatgtcatgcttttccacatttatgccttagaccatgaaaatagttgagctcatgttctcttggtaagcatctttgctatataagtttcagcctccattagtagtctggtggcactaaaagtttctccaaatgatataagcactttgggttaccagtacaagtgcttctctttctagagttgcaacaattaacactacttgtgatgatttactagtttacctgctgatatttgactttttttcacctctgtttcttcaactgtacaggtgccattgaactttctatcctatcggaatattatgggcgtgaaattgctgcatatgacatccagacaacccgctgtgatctgtatggtcaggttggtggatcttatattcctttacttttgtttatcctaaagtgttaaggcggtgtcttagctttgcatcccttgatacaggagaagaactacactgagcgaactatgctcatctatgatgggctgcattatgatgctttagctgtaagtattcatgataaatttttgacgataaacaaaacacaatgagatgccaactaattttggctgttttttatcaacaaaattcagatgtcaccatttgaaggtgcaccggaagaatttgatcagactatcttccctgtcgaccacaaatggtcgattggcccagtagagggccttgctcttaacttcgtgaaggatgaaaagaggtatctatcatttcaagcttagttctttttttcctataaagtatctacataatttgctgaaatcagtgatgccttgaacagaacatttagtttagcatgtaaccactgttcagaagtgattcaaaatatgcatcccagaaaccaaaaatgaaaagaagaggaagaagaagctttagctcctagtaaattgcatcatcgaacatgatcatatgtaatcgcaagtgcatcatgtgaatggtgttcattcatatgtcttattcaccattggttggacatgccatatgcaggaagaggagctacacagacactgcaaacttcaccttgcgctgtggcgtctgccaaattggtgtgattggtcaaaaggtaagtgatgctcttaaaaacacaaaatgtttttgtttataccaatccgtgatgaccatgaactgatcaaagccttctctcttggtgcacaatacaggaagccgttgaacatgctcaggccactggacatgtcaacttccaagaatacaaatgactgtacaagataaaacctgtgttgtaacttgtaaaacccatgttcatttgttccaattgataattcttctcgggttggatatggtatagaactgtattacaacatttgttacagggtaatttaataatgccagtttggataatccggtgtgatatcgacgttgacttgtcaactatgcttgattgtagtcattaccttgcatatcagcttctgattttgttttcattggttggttcacgctcacccctatacattgaaaatggaagaaaacttacatatagatgaatgtggcttacgttttgctgcctgatttcgaaagtttaaactttttaactcgaaccaagggtttagagtctcaacgattttaaaacatctcgagccggcgtgaaatgtgcatttcaaatggttttgttcgaaatttggctaatttcattcaaaattatccaaaaaaaaaattaacgtcttggtggggctggaaattaaactagccaatcgagattgcagactctgcttccaacatactacctcaaaactactacgaatttgaacagagataaaaacgaagttatttttcctcggatgtctgtgctgatggatgagttgagagttgttgcttcaaatcatcacatgggccaagcccagattctttttatttttcatttttgtttcttgtgggctcctttggttggcatgcatgcagatgctcaggtgtaagcttttaatatggcacatgcacgtacgcagtatagattctgtggagcatactgttttttcttttgtttttcctgtcgaccaggcaggaatctaatctattagctttgctcctggtcaaacttcccattcaaatggtgataaaaaaaacttaaatgagtcgatctaaagcagcatagacacccatacctgaattattttactcccaattaacatgagaccaagatagattattattatagtatttgtacttagtatgcagaaacacaggcaggacatgtatcctagcttacctttcaattaatttcttttgggaaacaagaggaaatagctagagagttggtccaagagcacgtagtatacctgaaactgaaaggcattgccatccaaaggataaaagtcacatgttgaaattaatctgacaacagaattaaataacagtaattaattttttttgcggggaataacagtaattaattaacaaaaaggaaaaggacagcagcaataacactaggaactgtagacaagatcggtctttcatctttgcatgcactagctggagtactactgcctatggtttggccaattgccatgctagggaaaaaaagataagagaaattattaaaagatatgaattaaacagtgatcaagttacatgcataaatggagcccacattgacatagtaatatatacacccagcttcatcttggcccatgcatgcatgcccagccatattactgtacaagttattactagcacagtgatatatgggccccaatatatattgtgaacactgtgttagatgatactctcccatgtgttacccaaagatcaatgttgactggttaattgttttcactagagaaaataaaagctactccttttgataactactactactccttttgttctttcttactgattggatatcgttacagtctccaatgtacgtgtgtttcgtcactattttatttctaactgtgtctaaaatattttaaaaaatgtacttttgttatgaatgtactaatatcgttttcacatataaaatagcaaattatatatatatatatatatatatatatatatatatatatattagtgatttacgatttaaagatatacctgggtcatcttagcaggacgttataattatttatttaaatattaattaattaattaattaattaattgggtgcggcctcctttttcattctctttttgactacatagtcatccagtagatctccctcctttagtcgctgtcaacgtacccttccaatccgaatttgcgatttcctcgtgacacatcgattcgacccgctttattaattttgctttctccttagctttccatgttcaaatgctaaattataacacctggcctttattatcacataattaatcagtgtatcttagcttaattactctgtagactaaaattaactaatgctcatgacatcaatccgaaagcaacacagatatgcgcatatatacaacgttgagatagtgcagcgtgatacgtccatgtataatactcactttatgaatgattaattaacttttggataagtgtgccaagtgtataaacttataaagatgacgtgtacgtatatgtcactattattgctaggtaagctagagctatagttgcaaggttggataattactcattaattacttttttaagaaagtaatagaagtttttattgaactcagtaaattgcatcaagatgatacaactgcaatgacaacactctcaacctttgtataattaagatgtataaaaccaaaacacacattaactagtttaaagaaataaatcacataaagcactaaggaccatcaatcctaaggcttattaataaacaataattgaatgtactagcaatgactttgtgagttcttttttttaattacttagtgaaattgtggtgctcatgaggtcaactagtttaaaatagtgattctacctacggttctcgagaggtcccgtgtaaaatttctcccaataattcagatattagagggtaccaaattttatacgaaaaattctagtaactctcaaggacctaaaatttgacgattaaaatcatttctttgcaaaaaaaatcactttaattatagctaattaagtttatgtatctgcaagactgcaacctggtatatatgtaaactctatgtaaacagctagaaatgtacagtaaaacataaggtgagcaagcgtgcctgcagatgcatcagtacagggcttctctctttagcaacaggcatgaaggcatgcatgcatgcatgaggtctccataattaaaagttagctagccccaaggggaacattgattccatcctaatcatcatcattgccccctcctgggctctctagaccactcttgcacaaagcaaagcaaaatattctcaattttaattaggagtagatgatattatgaacctcctagagagatatatatgtcttggtcttaacctttcatgcatcaaaggatgaccccacatgtggcaatatcatatttgggtgttgtccttatcagatatgcacttgcttggttagcaactcggcccttgtgattatctgctaattaattaacacattaattccctctcagatagggagtacctaaattggattagccataggcttttttcctggtagcattaggatgtgctgtcactttagaatatacatagactatgatccattggatttgtcttatgtatgatatgcataattaaggatgggacagtgatgagaagctaactccaagagagtcccatgcaattaagcatgcactccgtcccaaaataagtacagttttacactatttacgttcaacgtttgaccgttcgtcttatttgaaaattttttatgattaatatttttattgctattagatgataaaacatgaatagtactttatgtgtgactaaatattttcaaatttttcacaaatttttcaaataagacggacggtcaaacgttgggcacggatatccacggctgcacttattttgggacggatgtagtatgtaattctggtgaattgtactgacccagctctgttgctttcatgcatacacagtacaactagctagacctaggcatcattgggttaagtggcattatgtgaagtactgggttggttaggcccaagggacccctacattaatttcctgaacctaaccttagttctgaactggcatttgtgctcaacgaaaaattggtgttattgtgttactccctccctccatcccataaaaaaaagaatctagaaccgtatgtgacatattttattactatgaatctcgatatacattatgtccagattcgtagtattagaatatgtcacatctggtgttaggttggttttttatgggacggagggagtatgctaccggaatttgaattgctcaaatacatttattttgctatcaatggtcctactgcccttgtgtgcataatttgcaatcatgaagaaagcagagggagaccctatctatctgctgaccagatctgaaggagccacctagaagtgaacctccaccatgctgtcttcatctgcattgccaggtgaatctgcattttttttctctctgatgagttgcaatttgttactgtcactctatgtagaatctactccagaagtagaacaaatcaaaggtgaaaattttcaagagtatatgttagttccaatctgcacatgactgcaggctgaacatatgtcacttgtatttactgcaagaaggatacttgcaataagtaacagaatatacagacttgaggggcaaagattgtatctctttctgaatttggtcatacatgtaatgcatacaagcttttaagatgatggccctactcaataaaaccaactaaccctagagtggctatttctgaacattgctacataattttatactgctggtacctaacctcacaatcttcctttgttgattgacagtggggaagctaagctttagggcctttgccctaacttgaggaagaataaggccatcttaggaagcatcattggatgcctttcttgaccacttttgacactatgctactactactacctctcgatgaaattgtcttgtcatgctttgccaccacatgcatttctttctttctttctttctttctttctttctcatgtccaagattattcattttagttttttctaagcacagaacagagagggcccaatatatggacccaccagctcattgagtggactaggagcaatgcgggtgaatttatctccatcaagtctattcttgttgtcagttgctatgtacagtactacttatgtgttctacccttgatgtagtacatttttttctgaaagctgcatgccaaagttcagcaataattatattatgcattatgtactcaaaatcacttcttttcatctctctctctccaactgatgtctctgtaagattgttactgtatattgaaaaaaaaaagaaaacactgtactccctccgtctcaaattgtacacggatctgaacgtagctataaaagttggtttattttaaaacggatgaagtatctaatatgtgaaaaaagaaaatttcaaatatgtataggagatattagtatatgtgatgcaagtctattgtcagtaatgtatatgaattttagtccctattgttgacagttgccaacctcgtctgtcagcgagctctgcaagagaacaagaagcgtcgatcaagctgaggcatgattgacgcgtacgtgcatcgtggcaacagtcagtgcaacagttctctcgattgatcaggcagcgagactgacagctcagacagagtgattgtccacgtggcatctcctgagcctctccatcccagtgtaaaagcaaacagttcagcgtcctgctgagatgatgctgatcagcagggcaaaattttttgcaacttgttttcagagatagccaggcttttgcaacctctgcaggagaagagtgtcacactgtgcctgatgatacttcactgggagttagcacagtgtaaaaaaatttgaaaaaggcagagtttttaatctggatatgagtactgctatatactactgctagtagtataatattgcagctaatcattcctatagattcctaggagaatcagaggacttagacaggcaaacagagctgatcactgatcaggtgatgcatttttgcagcagtgtgccatgatagatatgaaagctggagtagctgcaaatgtgtgagaaaatgtgagagtgtcacgcagtggtttgtaccaagtgtaggcgagccgttggatcgagaatcgacggctgcgattgatcttggcacggcgtactgttgatcattcaatactaggagtggaactctgtctggtactacactcccaaagaatggctgcaatggatctgcatctcaactactttgagtgcctgctaagtttactagtgccccaatcagattaccttaacgaaggtagtgaattatacactgaaaaaggctccatttgtaacgtggaatttgttttcatttcttaccgttttttgtgaaaattaaaccgattcttgggaaactctctgcaggcttaaaaaggctccatttcttacccttttttgtgaaaattaaaccgatctcatccatcttacagtatgcagtgaattgcacacataaaagactctatttgtaatgtggataagaattatatctgtacgttttacggaaattaaaccgattcttgtgaaaatcctatgaatttctgcaggcatttgaatgtttaaattccatggatctcatcctccttacacaaggcattattgatgcccaagtactgtggaagtggcactggattgttttgcagtctatgagcacagtggctcttctgggtgattagttgaaggcaatttatttccctggatataattggtgacaattgtacagccccactacggctaccaagtcacatcaagcacaatcatactgttcattgacacaacaaagggaaaggagaggagaccacacacagtaccttatgctgtaatgagagttatggcacaggatggtacaatttggacaagctcatcctactgctactccattgcaattcatcaattggatggaattgtccttgcatgacctctccaatggctggctacctagggctcttatggggaacttgagatttcgagaagcagctgaggagtgacgagaagatagctattgagaatttaaaaaagttatgttttctagtttgtcttctagtttatttcctagattatatagcttctaattcttagaatttcggtgtaaagctaaacggtttatgagagttgaaaattctagaagaagctgcagctgcgagaagctttcccaaacaggacctttgtatactttctagcctactagtagtagtgtctggtatacactttcatacttgcatgaggacaaaaacctgtaaactgatcaactttaactgctgctgtaaattgatatgtacaaggatctagtagtaattattgttagtcaggtactaacacttggtggttgggaaaattcttatctgttgttgtacaagaagcatatggataaaacaacagagctgtactgacatgatacaatcaaccttagtctcaataaaaagtttaacagtaataagcagttcaattccctgtagggatctagtagaaaaagaaagactctcatctcatacaattgcctaggaggcttcaattgtttgaaacagacttactctgattaatttatgattgctagaatgcataattcacagtttcacacttctgttaggggctgctcattttgattttggcatgtatcccaacacttcctttttaaaaaaaaaaataaaagtgaggttttggcatgtacttttaccacaaacaagatgtaactgttcctctaaaaaatttaaaaagagatggaagatgtaattgtttgaaacatctatggggctatggcacctactgttttgaggtgctgccctcacctacttaggagaaagagtacccaccctctgccaatcccaaagagctctatctcctagagcatccccacactacaccttgcaaatgaattggccctgtctcaccattgccaatgcaaggaaacaaaaagaaaagattgttgaatttgactcttggatatagtttcccacaaagagcttagccctttctccaaagtggtcatagaaagagataaagactcgagagagggtgtgagagggaccatttcttaggtgcccccagcagttgcaaaaaatggtcctaactccagactgcatccctgcatgagaagttgagcacatttcatgagcaaaatttttttactgtacaaggtcccaaaccaatccttttctttgcttccttccctaagtagaaatggcaagagtgcaggtatccagaaaaccaggatgtaatgttccaaattcttggttggtagtatctctatatatctccatgcatcaccatttgcagagtccagcagctgttcagatgctgaattttcagcactcagatttggcaacaggagttgtgtagtatcacattttttttcctttatgccctgctgaccctcaatcctgaaaagtaaaatgtgaatcaaattatatctattagggcttcttcagaacgtaggaactttacaggattttcattggaaacatttcaattcctccaaatcgattggcccttaatatttttacattctccaaatgcatttgcatatgtgcttattcctgccaactttgatgtatgcacccagaattgtggccatgaagttaattgaaaattaaatatataacatcgaatcactcttttctgaaaccaagtgcctgctctgcttattgcacatagtaggtttttctttttgtgtcagtccatacaaatgaaaaggacttagatatttgcaataacatattatttgtcacaatcagcacatgcttcttgagcttgcccaaagtcctggtcctgcacattgctgtacaactgtgtctgcagtagcatgatagtagtaccatcagaaaagaaaatatgaaccaaaactgcttgcagcacattcagagatagccctgtcagactgtcaccatccgaggactaattaagatggccattctgccataattagtgaccaaaccagaccattgctccccttaatcagtaccttgattgatctgttactactagtagtagtagtactaatgaagctttgcattaaaacaactgtagaatatgcatgaagtgcaacagtgcatgacctactacccagttttcaggacaagacatgaagcacttggctgtgcgcaatttgttaattttcttgtgcaaaatgccttaatctctctcaaaggagatggtaaagcgaccggcatgtgaccctgccaagaaatgtcaagattagtctcggttagcctccggatcatgagggacctagctttcactgatgacttgtccaagaattttatagtaattaagcgtgatttccatgtggttatcatgtagcggtctctgaacgttagacgattgcatttttgttattccctccgtttcatttttttttcataagctaaatgtttgtatctttataacttaaaaattcatacaatttagatttatatttgtagatttatcttgagaaatacttataagacataattggcatgttgttaaaccatacgagttaaaatatattgattatcaaagataaaaaaaaagtttggcttagaataaatatagaaagacaaccaaacaagtattttaaaacagagagtatataaattagaatttataaaaatgttatacttcgatatactccctctagtaaaaacaatatttgacatcgatgttaaataaatttgactggagggagtaatgaactcggtactttttctacacttgtgttctcaaagttcaaaattttcttttgagataaaaaagtttatgaaattcagcaaagtctatcttatccatccaagagagagtatgcgtgcatatatatactcatgtattttagggtatggacccaagatggcttttgagggcaaatggagatgttttgtgctgcaaggatagggcacagtgtgggggactaggcgtgtcggtcgagtcactgtccaaaccagaatcccatttaggccgagtttagtttcaatttttttcttcaaacttccaacttttccatcacatcaaaacttgcttacacacataaacttttaacttttccgtcacctcgttccaatttcaaccaaacttttaattttggcatgaactaaacacacccttatccaaacccaaagctccttctccttctccatctcctcctctttctctagccatatagatcatggatgttcttcacacgttgccaaagatgcttcttgatgttgccattcatatgcatcgatcgatcgatgcgatcgatcgccatgtgatgcgtcgatcgaaaatggctggagactgtgcccaaagggcaaacgctgttatcggctttctgacgttcggtgtctctgcgctttgtttgttccattctgcaccctttccgacgataaaagaggattaagtttattccccggaaagaaaggaattggatctgatcaattcatctgtagatgttgtgggttatcaactattttgatttttaggaggagtctaataattcacatgattattttatacgagtatatgtcgcgtgcacaatctatatatcttatatagttggaaccaaaagtctcgacatgcactgagtcacatcgccctagaaatcctaatcgttggatcatccgttggagggcgagaatcctaaccgatatgaaactgaagagttaaaggcatttattctattatatttctcatgcatttcatcggtataattttaatatattcatttaacttaaattttttacgtttaaactattgatatcagactatttatctccccaactatgaagagttcaagttcattttccctcttctttttccttggcttgtgtaattgagttgtactattcaccaactagcttaacaaatgtttagagtcgaagagacaacatcaaccttttttatgtaagccggcgacttcattaaccgggaacaaatcgcagagacaatataaacttgtgtgtactattaccattaatcttttcttaatcggctcaaaatccagggttagaacttagaaaggtgtcggcatggaggatatatacaattaagcggccaattaattacgagcatatgcgtcgtccttgtatcatgggatgaccagtacttgctttttttctgtgtgaacatgcatgcattagcagcaatagctgctgcagaaaaaaattcagatatgtgtttgacgcagagcctactacgaagtactaaaactttcgtggtccagctgctgatgatgaacagttttcagattcgcatctttcagtacaaatcatctgtattttcctgaaaaaaggatgtgatcgatctaatccaccttttgaatttcattgctggaattccatcgattcaattccattaattcatggctgtttcttcacatgagagagagaatccgacatgtacgtactatacgtactcttgcccaactgtacggtattttcagtatctagctacacgtatcgtacgtatttgtgatagggatagggatttttttattttctttattttttttattttatttttggtgagaggatgggggtggcttttgacagctacggctgaaaattctggactagtttttgacagctacgttttcttaaattccacccatttttcgcgaaaaattttccacgcgatttggacgtcattaggttaaaatcaatagacagtatacttaagctgttcaaaacaaaaccaaacaatacatacagagtataaacatacaaatccagtttgtatagcaccaccacatatgatgcacatgttggtttgaccacacaatttactccgcaaaccaaccaattaattcaattaattaaacaaggtgtaataagaaggaaacaaccaaattattaaatatagttgaggatgaataaaacataagtcaaaaaggcaggatcatggagggggtgggatctctcaccgagaacagaagcgatcccttttcatcgcaacacgtttggattcaatggtccatacccatgacaccgctctctctgtctttgcttggtttatccatccatgaacagcagcagcaaaacgatgtcaaacccagcagtggcccaaggaaagaaaaggcggtgtgtgtgtgcgctgcaaagtgatcacacctttctctccttgcatcttttcctcattttcagtatcttattcttggccgtaattatgatgtactacttaaggagtatacccaagtactagtagtagagtactcattgtcttaagataaatcattcagtacgaaatactcctataaatctaaatataaattatgtgttagaaaagataaatttatttttgaacaacgagagttgaacaaactatctccatatcataatatatgagatacttgtatatggtacaataaatctggacatatcttctatccagatttgttgtagtttatattatactatttctgtcctaaaatatacttccttcattctaaaatataagcatttttagattttgatatagtcttcaagatactattttatccaaaaatataaaagcaagatgttttaaataaaaagagtttcatattataatagtttgtttaatactaataaatctactagtaacatcaatttacacgatagatcttgttttttttctattaatagttaaagttaaaaatatttgatttaacattacgttaaaatgcttatattttaggacggattaacaattttttgagtgcatggatatactccataccattcacttaaagatcgtttatattttgggagatggatcaagtacttttgcagtaaactagtactagatgcacttgcagtaaaaaattctgtaaaaagagttttttttttactgcggggttagaactggaagtagaagcatggtgcagggaggagaaaaggttgtgtttttaaagtgcatagagaaagggtgaaccgaggagaagagagagaaagcgagagagagagaggagctcagctcagctcacctccactcgtggggttaaaaccccgagaactgcacagcagcagcagcacacggcgcagcagcggcaaaggcggcagcagcagcagcagcaagaaccgagcaaagtcgcaagaagcgagcacacacactcctctctctctctccctctctagctactgttgttcttggagttgtagaggaggaggaggtggtggtggaggtggtggagatagggggaggatgctgatgctcctagtcctatcctagttcgtcgtcaactccggcggcggatctgcggtggagcggcggctggattgtcgagcggtgagggtgacacgcatctccggagctcgccgcaggcgggagggatctgaggcgcgtttcttaatttgccttctctttgagctagctgcaaaggcggcggcgtgcggcggcggcggcgtcttggcgcgcgcattctatccggcgagtcgacgacgacgacgaccttcgcgccggtgtagcggcgcccgtgatgtgaaggaattcgagctcgctcccttgggatcgaaaaggttgcgggttggagaggcaagaaggtttggccggtttggggaaggagagaaagcgatggtggtggtggtggtggtggtggctgggttgcttgctccatgacacgacagcgcgtttgggaacgcctcgtgatctcggtgcagaaaggattccttctctgctccatttcttgcactctccactttgcattctagatcggttgggggaagaagaagaagagaagaagaagaatgaagctctcgccgtcggccggcggcgtctccgaccagccgccgtcgccgccggaaggtatagagaatagtactagctactctagcatcttctttctattgggcattgagttgaccagttgcatctcttttgttattattattttttcttttctttttgctcattaatgctcttctcatccattgggtagtttatgttcttaggacaagttagttaggttgttggcttggaagtctttaaatttcgtttggtaattatgtgctccaaatcaattcaatgatgcagcctgtcgatttcttcatcttttgggtgatttgtgctttgaataaccgagttactcctgttacagtaatgatacatacacatgatgcatttttttttcattagactgcttagttatacttgtctacaagcaaattagtgtgatttttatttatgcagtaacttttttccctgtaaaagtcatctgcttctggaaacatgcaaacaattcgtattcttaattcttgagaactctatccccttccccttcatttttttttgaaaaatctttgattttaaacatctttgttagccttaaaattatcttcttgaaatacgttttgaactaggatttgattatgggatggttcaagaattactgctgacaactaaaatttatgttgctgtgtgttcttctgaaatgattttcccctctttcagttgcagaggagcagaagtgcctaaattctgagttgtggcatgcatgcgccggccctctcgtttcgctgcctgcggtcggtagtcgggtggtttattttcctcaaggccacagtgagcaggtagtcttcttcatcttagtacagattttatcctcataagtactagattaacctgctgcagtacttgaagtatcagcaaaattagtaccgtaaattttacgttttttcttatattgcaacatctcattgtcagatcttaaattgcaaaggccaaagatttgtttgagatgttaatgagcttatgtacatttcgtacgtaggtagctgcatcaacaaataaggaaatggagtctcagatccccaactatcctaacctgccgccgcagcttatatgccagctacataatgtgaccatgcacgtaagtctggagcaacacaagacatcttattgaaaactatgtaatactgttgttacttttgtgtctcatcaactttttctgtgtttcttcctttaggccgatgcagagacggatgaagtctatgcgcaaatgacgctgcagccactcagcccggtaaaacagaattttctaccttctaccctatatttgtgtactcttgtttgtatctaagaagcttacactttctccttattttttgttttgttttgtttgcagcaagagctcaaggatccattcctacccgccgagctaggcactgccagcaagcagccaacaaattatttctgcaaaacgttaactgctagtgacacaagtacacatggtggattctctgttccccgtcgagcagcagagaaagtatttcctccgctggtatgtgttcttggttggctattgtatgtggcatcctttgaacagattatctgtacttattcagagaagacaccaagttattagtgtttcttaagggttcctttgatgattctgtaggatttcactcagcagcctccagctcaagagttgatggcgaaagacctccatggaaatgaatggaaattccgtcatatctttcgtggttagctattttccgtttacatccattccttcttaatattgttattttcctcataatgcttgctgccttgttttcacgtacaacttatgtgagagtcaaatatctatcagtgacattctattttcaaataagaatcttgaacaagtatgataaacatgtaaaattaaacttgtgcaggccaaccgaagcggcatcttctgactacgggttggagcgtctttgtaagtgcaaagagactggttgctggagactctgtcctttttatctggtatgttcattctttgaaattctcaaaagtcactaaatttctccaccttaaccttgtcattcccagcagagattttttatcctgtcgtatgatgtatgtctctggttgatcaggaatgacagtaatcagctgcttctgggaattcgtcgggcaaataggccacaaacggtcatgccatcatcagtattgtctagtgacagcatgcatattggtctgcttgctgcagctgctcacgccgcatcaacaaatagccggtttactattttctataatccaaggtaaaccatattttgcacatatctgatcatttcgtacaagtactcaattcgcattcattttgcagagcaagcccttcggagtttgttataccactggctaaatatgtaaaggctgtctaccatacccgcatatcggtgggcatgcgtttccggatgctttttgaaacagaagaatccagtgttaggaggtatgccaaatatttgtttgttatatatcatttaattcattctgtgagcatcacgtaatgctatttccttttctctacgtgtttatgcattgtctgtttatacctttatggttttatcttctgttgtgatgtgtagagcttttgcagtctctacctaatattaagtggcctaaattgcacaattgctcttatttgcagatacatggggacaataacaggaataagtgatcttgatcctgttcgttggatgaactcacactggcgctctgtcaaggtagatcttgaaacatctgtttgtttatagaccactcatatgcttttattacctcatttttagtcttatcatattttcagatagtgtgctttagtcattttctaccttcactatgagcttgcttcaaaattaagcatgtgaacaaggttttctttgaatcatgcaggttggatgggatgagtcgactgctggagagagacagccaagggtgtctctttgggagatcgagcctctgacaactttcccgatgtatccatctccttttcctctcagactaaagcgtccatggccaacaggcttaccttctttatatggtacgagtgacattagcatcttagtcagccctttaaactatagcagtgcacaatgatcaatgatgtctcgtatgtattattagtgcattgctctgatgttatgataatcatattcacctctgatggttttggcaggcggaaaggaggatgacttggcttcttctcttatgtggcttcgagatagtcaaaacacaggtttccaatctctgaattttggaggacttggtatgagtccgtggatgcagccaaggctggatagttccctacttggtctgcaacctgacatgtaccaaacgatagcggcggcggcggctttacagaacaccactaagcaagtatcacctgccatgctgcagttccagcagccgcaaaacattgtcggtagatcttctcttctatccagtcagattctgcagcaagcacagcctcaatttcagcagatgtaccaccaaaacatcaatggcaactcaatccaaggccatagtcagcctgagtacctccagcaaccgcttcaacattgccaatcatttaacgaacagaagcctcagttgcagccgcagcaacagcagcaagaatcacaccagcagcaacctcagcatcaacaaatgcaacaacagaaacacttgtccaactttcagactgtaccaaatgcattgtcggttttttcacagctttcctccacccctcagtctacaccctccacattgcagacagtttcaccattctcacagcaacataatttccctgacacaaatatcagttgtctctctccatccaatgtctcatccatgcacgatacactgagatcattcccttcagaagctgcttcagacctcccaggtgtgccaagaatcacccctgtacctgtctctgacccatggtcatctaagcgagttgcagtggaatctacgatcacttctcgcccacatgacatttcatcacagatagagaacttcgacttgacaccttctagtattcctcaaaactccacgttagcaccactgcctggaagggaatgcctggtggatcaagatgggagctctgatcctcaaaatcacttcttgtttggtgtaaatatagactcacagtcacttttgatgcaagatggcattccaagccttcacaatgaaaacagttcaagcacaattccatattccacatccaacttccttagcccttctcaagatgattatccattgagtcaaacactaactactccgggctgcttagatgaatcaggatatgttccatgttcagataatgctgatcaagtgaagcgaccgcatgcaacctttgtgaaggtgagtgaatggcttgcatgcttgatgcaccatcagttgcaaagttgcatgtttttttttcctttttcctcaattcactttgaattgacaaacttgtgtcctataggtttacaaatctggaaccgttggaaggttgctcgacatcactagatttagcagttatcatgaacttcgtagtgaggtagggcgcctttttggccttgagggccagttggaagaccctttgagatcaggctggcagcttgtatttgttgaccgagaggacgacgttcttctagttggcgatgatccgtggcagtaagttttaacaatcatcacgagttccttagcatctttctttactgtttatgccatcttcttacatccgtgaggttcggaatctgcagggaatttgtgaacagtgtgtcttgcataaagatactttcgccgcaggaggttcagcagatgggcaagccgggcattgaactcttctcgacttctgcaaggagacttggcaacagctgtgacaactacatgagcaggcaggaatcaagaagcctaagcactggaatcgcgtcggtgggctcagttgagttctgagaaatagggagctcatagcacccggcgttaggcgtccagttctgtacgtctctgtagctcttagttctgtgacctggaacccaagcacataggtcaagtgtagctctaagttatgcgctgtctggtaattatgtcatattacattgacttttagtggtacctattacattttggtatacatgccgacactttgtttcctggaatactgatcatgttaacttagggcatctaattattaggttcatgttgagtagtgctgtagtgccgcaggcgctagctttggccatattctgtatattgatgatgttttcctcctgcaatgtactgttaatgacagcaagtaaggttttccatgcaactgtgaaaattcagttcaagaactattgagcttatatatgtactactaccaaatcagtagtaagcagctttgttctagaagtgttccaaaattactgacatgttgattagcattgctgttttcagtaaaaaaaagtagtttttatgtgatcctggaaagctcatagatagatccatgagggaattcacctgaacctttatgcttacataatttggcaccagttcttggggacaatgacaggcaaagaaatggaccagccatccatgtgcctcttcttcaaggtccccatctgactgaagaacccttgacaagtgcacacccaattgaaccaatggttggaaaaaagatagcctccctttcttgaaggtcagcggtggatgatgaggtgaatgtgatgccttctctccccatcacatatccatttcttcagggtcctaatgcctactggtaatgcctatccctgttctgatcccccttcgtcgaccttccggtcgcgccaacgtgttagaatttggtttgatttggttttggttttggtttggtttttggtggttgtggattgtgacaaatttaaagtggagggggggaatgtggagtgcaatgacatacaccaccaccatccactcttttcaaagatatggggcatcttttctgaacccaatcaatttcttttctgattcctccatctctttcagatctttggctgggaccctaatttggatcccagatcatatcatttcctaatcttgactgacttttcacaacggaaaaaaaaaagaagaggaaacctggcaatgaaaatggaaggaggtggagaattgccacacatttttcatgcttgtttttttcttcacccctgatgtctatgaacaattagcaatgtgccaaaactgtcaacttctgaactttctccctagcccactaggctaatagtatgtaggtagcatcatcatgtgcaagagaattatctcctgctgttgcattggtttaaggaggcagattctcttacctgctttctggctgtggatattgtgtggttgaatagtgttgtctgcttcagaagcatgtggtagtgtgtaagttggataagcttgtctgcttgtaatggttctgtctgcttgagatgcataagcttgctgctgactctgtcagcaagaatgtttgaagcactggtggtaccatattgatgttgccttttactgtcaattttaagcttttgaagtagggccttgcttcagacctcaattttagaaagaaagtatgtagccatatttttaagtagtaaatctaaaacaaaatcagttaatttatgcccccctttgatttatagaaaaaaaaaacatcggaaacaaattcttcaaggacttttgaaacaaatgattgaatcatatccttttctttgaaatttctactgaatgaataatcctatagatattttggaggaaagttagaagtgctccaaacccttggaagatttacttttgagttcctctcttatccgctttctgtgttttcttatggtctattcaaaagattatttatgtattttttctatgttttacaatccaattttttttcaatcttgtggagccttaggttgagaaaatttgtagcaacaccaaaaataccaaaaaaaaaactattgctttgtacaacttcctggcatgtatcatgtgagattgtgagggcatgaaccggaacaattgaaatttaataatatatattaaaaaaatatatttttaggagttgaaaacttctggtgaatttgattcataatccagttatctaattgaaaaaaaaaacatttttttgcccaatgatcatgtcaaaccggtgaaaagaacattttttttcttctattttgcacaaacttggactaactgcaaacctgaattctacattgcaacatcgatttcatagcctagtattgctcttcttccctccccgtcgatctgcttggacaaggagaaaattaagaatatactgctctatttgataaatttcgataaaataccactctggatcctcgatgtccagctcggaaggcggttaggggttgagagatcttggatgagttacttcacctgagcggaggaaggaaggatcaccggagttcgccgttccacggaggcgacgccacagcaagacggctgccgccggtgactaccacgacgacatgaccctgggagccagccacgcctcgtcaggtttccaactggttttgaccagttgaatgaacctttacatgcctgttatggcattgggtatcaggatgtagtatatgttacaaacttacgaagttgtaatgaaaatgatcatgatgtgactgtaaattcacaaacatcttcaccatgtctcggatttcgtcgaagttggatatacagttcagggaacctgactgcagaaagaaaattcagagaattgtagcatctccatctcacagtttgcagcaaagtaaaatcgacaacgatgagctatatacagtttgttcatggttgtgatacaaaggtcggtgtgtagtatttgctttcgcaatttatacatttcataaacacacatatcacactggactactaaactataaccgggagtaaatggagactgctggacctttttggttcagagttgagagacttgagagccccctttttctgaataataactttgtttcacgatcaacttaggtggcaaccggccatggcattcttggaattgcagatttgcggttttaccagtggcgcctttattccattcattcattaacacttttgattttgaatctgcagaattcagcaactacacgaaggtgagtattcatgatgaaaaaatatgagctgctatctttcactctacttgaaagttcaaacaagacttactttatcatcaccatgatacctgcaaaaccacagatggatcatcttcagccatgttctgcagactgttgatcgcttccgctgccttgctgcctagcattacttgcagtgttctcgtttgaagcattgtttccagattgaccatgtctgtgatttctacgttgagttaaccgttgattccgcaggagtctccacctcaggtattctattagcattgcatttagactaatagcgatgccgaaaccagtgaacgatgcaagtaggattgcaaggactgcccccatttttaactgcatgtttagtaattgtaataagcaatgtgctgaagatattatctagaaaacttattgagcttacgtcaaaaaaaaaaaacttattgagggcaaaaaaaaaaaaacttattgagggcaaaagctccataccaagttgtagaaaatatgagcaaataggattaggaaagcaaactggaacgtagcgaaagcccataggtaattatcggttgctgtttcacagagataaaaaaaaaaggttaaatgtggaattgcggtagctgttcagcagaaatgctggaacatgataatctgagtttatttacaccaaatgatcaagtaactacataacatctaatatttggttttaaaatgagatcatggaaagagcggtaaggagttatgttttacattctgttgaaaagctgaaatcatattatataataattgttttccctggtaaagttgttacacaatcaagatatatatatatatatctaactatgagggtagggtggtcaataaataaatctgaatttggaaaacagtgagcttaggtaccaaaaggctttttggttccctacacaatgtactgaactcatgattttgcaattgcgtagagccagagaaaagcaagtagtatttcattacccattgtggatgcgaggatggaagaaaatatgcccaggagacaggagaaaggcaaagaaatagctagtgcacgtgacttcatatcagcaacctgttaaaagttccaacaagtgggacagtggttgggttaatttgacatatacacacaaaattcacataatggaaagctaaaagaagtgtagcacaaagtcacaaaccaagagttgctccaagaaacagaagtacgcaagcgtgctgaccatgactagaactggagtctccttccaaaatctgtcagaaaaggagaatttagtaacaagaagacaaatacattaatgtattaatgatatttctcatagtatagacagaaaaaagaacaaaacaattgtcattcataaaacgtgaagaaaacaacactcatccagtgtgcacattttataagggtcaaaatatcttcacactaaaaaagtgtgttttgaaatacctgtgtggatgtgctgctctttgctgaacaccattccgcggttgtctgttaacagttcgaatctgtattctcaataaagtcacaggtagattctgaacttcctgcctgcaaacatcgcatgtcttgtttcccttgatgctaaaccattttattgcacactcctggtgtgcaagagcaagttctcccttgcagctgcactccaatttaagtgtttcacctccttcattgagttcaactaggcaaattctgcagacagcatcttcttcaggaatgtcttcacctccatcttcaggagctaccaaggatgaacgacacaaaattcagtgtttctttcctgcagctttgctatttgaagagaacattttggttcacgcgaactttgattgcgctacaaaacgttttgtgcctaatgtactgtacactgacatgcaaaagagtaaaaatccaaggttagtaccatctactgcttcttcaatgccatcatttgatgcaacagtttcaacaggaacaggtcgtggggttgtgggaatcacacgtataaggcctgatgaagccgtcctcctcagatccttactatcatgatttcctggtgctgagagtgagcgcctaatttgtgtttcaacctcattcttctgcaaccattgtgaaccacattaatacgagatgatcctcggtgaactgggcgcatctcatactttaaggtgtaaatgcaccagtttggttgtttgataatagtccatttaatttccactgtatacatgtactagaaaaaaatgcccgtacgctgcaacgggtgaagattattataatcttattattgttatatggtttagctaggataaaattcactgtggaaattcgcttggatatatatatttttttagaaaatcatgagctgcaattaggagtctgatttttatctcaagttagtatgcgagttttctcaaagagatttcttatacgactcattttgtttttctaaaagcaaacgaacttaaaatccgattcataaacggatctgtattaccaaaagcgagcgaacataaaaccgactcaaatacggatgacataccaaaataccggcaaaaacatcttcaatttttagtagagattatgtcatattacgtcaagtattattaaatcccacaacccttgccatggaattgtgttataccaaaatagaccagcatgcaaacaatgcagtcctagttaaatacttacaactgtacttggcaggttgtctgcatgaccttcatgagaagaaggtcctgaagctgcaacaggagtaactggaagagagtgggttcgcttcgctgataaggagttgatgacctttgtgaaagaaaatgatcttgatgtagttgccttcacctgctgtcctgatgatgatggtgtgtcaggaattagaagaattgtctggtcaccatcctgtaatgaactctttgctttgaagctcctttgtggaatgatgcccctgatggatgattttgttctagttgaattcggccttggtggtaaaccacttcttgcagaatttgggctgggtgatattttgattctagttgacgttggcagagtgtcatcaaatgccctgtttggtatttgtaatgaaaggtttggccgtcgcgaattctgacaagatacaccatcacttttagcatcttctccctagtaacaattcaatcgaacaacaatgtcaatcacttacattaaataattatatgattggtttgaagcaaattaaaaagaaagagtggcaatgtaacaaaagacaaggaaacgccaagaatcaaccatgtactaggctactagccattgcctattgcatcatatattcatagtactaaatactaacacgaggaatagatactcatttggcatcaccacatcactgctgtttgtttcttcactcttctactccctcttgtcctgtccagattcgtagtcctaggaagtgtcacatccctccaaaatcccttatattatgagacggagggattatcaagcatgtgttcacattcagacatggaacaagaaactaagagggcctttactaaatttctgcatgaactgcagtggtgctcctaccatggtgcaaagaagagatctttttagataatggaagcttttatttcgagataggtgcaagtaagagtaggacaaacgcctgtctggatagtttatcagaaatcttcaagtatgaacagagacgagtgcactctccaagactaatagtgagtgcgtatactgcctttcttaattctcaaataggagtagtttggtttattctgtgtgactgacagtcacagcattcagcactaggtcctaatttgagcctttctgggttaatctttgaggacagaaaaaaactaatattgaattcagtagctaatatggccatgcaaacgtctttacaaattacaatacgctttgttatgaaggtttcagtgaaacagtttgatcagaatatcagtgacagttattcagtcaagcaactggaattaaacagcagtatcatgttaacaacgcctgctcaaaccgctaaagcaaagcaaaatcgaaagagtaaaacactaaaagagtaaataaactatgtatgtctagctcgcatgtgtatggcaacaacaaacaacagatggcgaagaatccacaagattccccaccaaaacagccaaaaacgacaacccaattccaaaacagaacacccccagagatccaaatctttctaacgaaatacagacactatactagctcccatgacctattggaaacatccaagcctgaagctgacaaagaatcccacacagcaagctaaagaagaacaaaaaaatatcaagaattggatccccggggtgcagaatctcaccgcgcgattgctggactccgccgccgccgccgccgccgccgcaccaccggggctatccatccgcggctcaactagctcggcgacggcgagagcgagagacagagagagagagtaggtggcgtcgctgctgtgtggagtcgaagtcaagggaggtggactcgcgacggggggcggtgcccagttgaggggctcgaggatgaatgatgacgtccgcttttgcagtttgctccaccacttttctggtatttttttcttgacctcgtactctcaacactttgtccttgctaatttttactgcctgcctccgtctcatactatactccctcacaatatgtaacaacctaagatggatcgactacgaatctgaacatagggtctaatttcatcatgggttgctacatatctggatggaaggagtagcaatcttgggttatacatgactcttgagtatgtgactcaacctagtattatgaatctgagcaagcttcatgtctaaatccgtacttcctccgtttcatattataagactttttagcattgctcatatctattgtattattaaaggaatagaaaaagaagcctccatgttcgctctcatggtctagaaattctcacattaatcggagaaaagaaaagacagagtccatatagaaatacaatttagaaatagttgaaattcggaattaaaaataagaaatattagaataggagactagagtccatatagaaatgcaattaggaaataactgaaatccggaattaaaaataaggaatattagaagtagagtatagagtccatatagaaatacaattagcaaataactgaaattcggaattaaaaataaggaatattagaagtagagtatggagtccatataaaaatacaattaggaaataatagaaatttgaaatttaaaataaggaatattagaggtagagtatagagtatatatagaaatacaattaagaaaaaaaagaaattcggaattaaaaaaataaggaatattagaagtagagtatagagtccatataggaatttataactaactaaaatttagaataaacataataaatttattaaagtcaatataggaatacaatttagaagtaactgaaattcgaaattaaaaattaaaaaatattaaaagatgagtttagagtccacatataaatacaattagaaataataaaaattcagaaataaaaataaataatagaagagcatatagtctatataaaaatacaatttacaaaaaatttagaattagaaaaaaagaaatattaaaagatgagtctagagtccatatagaaatatatataatttacaaataactaaaaattgatattaaaaataattaataactaacacgtatataaaatacaatatgaatattacacattagtagttttgtaaagttattgcgaaatttaaaattatgttgtcattttaatatatttgaataatataatgagaaaacatatatgctattatatgagagaaaatataatgatgctagccgcgcaatttgcgcgggccaccatgctagttcatatatatgttaatgaatctagacatatatgtgtgtctagattcattaacatctatataaatgtaggcaatgctggaaagtcttataacctgaaacggagatagtagaatagattgagtctcatctgataataggctgctatattttggatggagggagtaagcaaaatatcatatttaaacgtgatgaagtgaggattaaataatggcatgtaaaacgagaaagtaactaatgtatgatttaattaagttaataactataaattccaaaaatagacttatttgatattttagagtaacttttacataaaaaaattccgttcgtatcatttagtcctttctttagatcgaaacaaggctatgatcgctgaaaatttgttactactctctccattttaaagttataagacattatgactttggtcaaagtcaaactacttcaagtttgactaagcctatagacaaatatagtaatatttataatatcaaattagtttcattaaatcaataattgaatatattttcataataaatttgtcttgggttaaaaatgtttttatttttttcttcaaacttagtcaaacttaaagtagtttaactttgactaaaatcaaaatgtcttatgacctaatacggatggagtactagtgtacactcctactccctccgtctcataaaaaaactaactcagtactagatgtgacacatcctaatactatgaatccgaacatatatctatccagattcatcgtattagaatgtgtcacatccagtcctatattaaattttttttttggacggagagagtaagcagcaagctgccccgacgagctttgaatctttttcatttttctgaccaatttaacagacagatgcatcggaacatctggtatttgtctaaaatgcttgttatcaaaacagagaaaaacataattggtgtaacagaaacatgagcaaatatgcaagcaaacttaatggaataggggcatagcttcctttgaaaaaagaaaaaaaaacaaaatcacacacactaaaaagaagaggtaagattataattacgactcaaagctagggtataaacataacggtcacttgtttgaatggtacgaggaacttaaatataaatttgtcccattggaatattcaatattggatcatttgcaagctggctgatcggctaatgaaaatcagaaataatcaattgaagattatcacaaggtgtttactgaaaattgcagcttgttccaaaatccaaatgtccaccagctgcagagcgagcacactgaactggaagtgcaggcttattgtgcagtaaccaaaagctgtctcatgagtggaggattagtccccgagcactctgagattagcatttttagttggccaaatcattagccgttcgttcccgcgggccccacccgtcggtgactgcacagtgctggctcaccgtagaccgtgtccaaatggctggacagcaacaaggcgatagttgggacaggtgagatcgcatgctttttacaagtacgctaccataccacgtccgttctaaaatataacaaattttaaacggatatgacattaattttaatactataaatctgaacggatctttgttttcatctattaaaaaattgctatattttagaacgaatagagtaccttttgttctgttcatactttcattttaaatttgaaattagagcttttctgatttgttcatactatagagagtaatttaggtgcctcctccaaccaaaagtccagtccatgagtaattgagtattgcaaattgccctatatgaaatatagtatccatcataacctattgcagtttgattgctagtagtctttattatgttatcctaactcaaaagaacacgttttaaatcgcacttcttttccaagacgaccggcctactaccttcgcatttaaatacttaacactacaaactttattcagtgtgcaactatgaccgtcatttttcttttagaaaaaaaatatctaacaaaattataagctgtaaaaatagttgaagagctagtagctttaaaattttaaccaaataaatcacgatagcatatacttaaatatactagctgaattgcaattctcacttttcaactatgtgaaaaagaaaagaatatttttttaactgttttgcggttagcatgacaaaccaacattatatcgacactacaatcaactacatgtactccctccgaactgataatattgttttataatattgttttagattaggacgaggttaaactttagaatctttgattataaattatttttaaaatatttgttgtttatacattgtgattactacatatataaattagtcttaaaaagtacttataatgaaaaataatggtggttgtttttttagatcataccattgtccaaaacgataagttttatcgaagggagtatatacgtgcacgtctaccgtgtaattattcaggaagataaaaaacaaacatgtcacggtaccaatcacaaatcaatcaacacgagtgccagcagtttcacgcaagtgctaatcgagctcgacgatcctgcaaatggaccaaccaagccaccaaagccaaagccatcgtaacactgacctggcgagcgatcgagtcaatcgactcgttttcaacttggacccgacccacaaccaccaccacatgccacaatgcgcgatcgcgtcccgagtccgacccgccgagccgccgccgccgcgtcgagcccgagccgcgccacgcgtccgtctctctgacaggtgggccccacgcggccaacgcggccaccacgtggtcaacggtttgaccggccagcctatcctcctgctcctcttcttcttgttcttcttcttcttcttgctcccgtttcccgattcccactgcggagaagtcaaatacggccacctggttcgctacaacccaagcccaccgccgctgcgaagctgccattcgccgacgaacagctcgccggagaggctgctttcccggagctttgagcttcttggactagctctgctcggattcttgcttggttgggattatcaggtgagtcgtcttcttggttgatttctctggattctgcggatacaaaggttggggattgtcttttcgttgagtatggaattagggattgcttgttcgttgatagtagtagtagtagactgcttcccggtgttgattggttaaagatttgggaatgattcgtgagatagatgagagccccgaattcgatggggggctaaattgagttcttttcttaggttgtctttcaattttacatgctcatgaatggatcttcgattttgtaccttgtcgtgtgtgatcgccaatctgtatggaaatcagtttacatattctgatttttttttttgggtgagtggagaatgtgctaggattaggatgtcaacaacaatggtgggatggaactttcgttttcgctttggagaccaggcctaatcatgcattactttattgtatgttgcgtgtgggatgcagtaggtctaatcatagattgtttctatcactagcagagttagttagactagaaaatcttttttttttccattttcttgaaattagttggtcctgttgacgagcaattgatcggatggtgcctgcccaatgatagcgtttctgtgggtagaaattatgaaatgtagataaattctagaaatatagagcaatccgtactgctgctggctggctctaatagtctaatactatgttagttcatctcacctgcttcctgcttgcattccccgagctttaaacatgttactcccactttaagttgtataactagatcatctttactgatgttggttgagctgtaaccaatcaatggcctattttggctgcttattgtaatttttttatcacgaaacccacataactgctgcatctagtaaaacagttgaagcaaggtcagtctgacatcgagccgtcgtggtaggcctaagattcttgtggtttagctgtaattctggaccttatggacaaatgaaaaggctgcattcattctgtgccaccatgacaatttgcagcactcctggaatgtaacatttctgtataatgttaatcatgaacttaatgtttgaaatggtaagtggctaagtgctcaatatacctttcttcttagctaaccattacctgcattctttcttttcaggacatgatggcagctgttgaaaattgatgacatgcttatgtggatattcacaagtgaaactgtatttgttgaactgcagaattaaggccatcatagtagttttagatttcggtaatgggttgtttttgtatatttggcaagagaagggcaacccgacagcaaagttctcagcataatgatggtagagatctctaaaacagactgcattataccctatttgttgaacatgatttgtccatattcatccttgatatgtttcttgctgaaatatttaacatgatttgtacagacccctctggtgatatgaatataacaaaattcacttacaaggagctttcaagggttactgaaaattttagcccgtctaataagattggtgagggaggttttggatctgtgtataaggtaatataagtagccttcaaagttcaaacaaataagtgaagaaaaattccaaaaaaaaatgaattctcacgtgttcatcatgatggattaatggtgcagggaaagctaaggaatggaaagcttgttgccgtcaaggtgctatctttagagtcaagacagggagcgaaggaatttctgaacgaactcatggcaatttcaaacgtatctcatgaaaatcttgtcaagctttatggctattgtgtggaaggaaaccaaagaatccttgtctacaattatcttgaaaataatagccttgcacaaacacttttgggtatggttacttgaatcgtttctattgctttatcctctcaaatttttacatacagtgctaagaaaaggcctagatattcaaacagtttcctttgtttttcctcttttgttttttcaggttatggccacagcaacatccagttcaactgggcaactcgagtaaatatttgtgttggcatcgcccgtggactaacatacctccatgaagttgtaaatccccacattgttcaccgggatatcaaagcaagcaatatacttctagataaagatcttacgccgaaaatatctgattttggtttagcaaagcttttgcctccagatgcatcacatgttagcacaagggttgctggaacattgtaagtaaactttgtcataagttctttttataatgagttaacaagtacgatgcatttttcaagtaccttatctttttcttgggtatctatggtagtgcctatagcattcctttcagtttaaatggttgacccatatgacagtacaccccgacaatttcttttacattttatgaaatgattgtcagtggaaaagctaaggcaattaaaattgcaaatatcaaatgattatttagtaatttatggattatatttatgacccatcaaatatcaatacacctgcagctttacttactcagttttacatgacagaggttacttggctccagagtatgccattcgaggacaagtgacacggaagtcagatgtttatagttttggtgttctgttactagaaatagttagtgggagatccaacaccaatacaagattaccctatgaagatcagatacttcttgaaagggtaagataaaatacaatacttttttttgttgttccttgtatatcagaagttactatctttttttaccatcatcactaaattatttatttaggctgaagttatatctaatatgagtgttgtatttgttccatgaactaatgttggtgccttcaagtggaagtcttggtttcccataagaggactaatggagatacatgcagttattgcttttagaatcttagccatgacatttcaagttttcagctattatatttgtaaaatcatattctggttttaatagttaacactcttgatcaccgcataatttactaggtgattatttgtgctttttatagaatgtgatcaaatttcacttgacagcctagtcctctcagtagctgtgcagggcacattagcaatgccttagttttatgggtactgctgaatgtgctggttaagataattatttacatgggcacaatggaaattacatattgggagtcgcaaacatgaaagcattcgtgaacaaaagtttggtaaaagtcaaatcattaaaaaatagagggagtaaaattgtcataatgaaatgcgagttgcatgctgccaaacacatcagttgccaactttttcttctacatgaaagcatcatcatcatgatgtaaaagttattcgtgtctcagctagggagcaaatgttctgaattggggcttttgttcttttactgctacagttcccagagatcacaaatggggttctcctcttgcagacatgggtgcactatgaagagggtgatttggagaaaatcatagacgcttctttgggtgatgacttggatgttgcacaagcctgtatgttcctgaaaattgggcttttgtgtacacaagatgtcacgaaacatcgacccacaatgtcgatggttgtccgcatgctaacaggtgaaatggatgttgagctggcgaagatcagcaagcccgcaataatcagtgactttatggatcttaaggtcaggagcatgaggaaagaagtggacatagtttcatcctcaacatccacattgctatcttccatcatggcacactcttctcctttgttgtcgcaagagacaacagaagcctccatgacattcaccgcgatatcagatcgtgagtgacccgaggttgaatgcagatacgaagattgcatcgacaaaaggtagtgtaggagaaatgttttccagaaatctttttgctggtttgatttttttttcgatgtatagatttacttcatttatagcctgaaaagcagtctagagtgaagaaagtacatgatagtatatcttgtttgttcatggaatgtctcctgtttttgaatgtgcaatggacacttcttcagttcttaattgtacacgacaccttgtctgctgcttgtgttctgagataaattgccaaaaagaaacctgtctacacgaacaatgttttttccactttcaacttgtaaaatgacagatcatattattgtcttccatgatgatcatctatccctgtaacgcgtgatgttgtgaagaatctcttgctctgcttcctgcacactgaaaactgtaaactgatttcagattcactgggatctggatagttcagatactgttcatcaccaatatgcaagtgcagccactgccatgctgtctgcaggaaaaaaaaagtcataatgcaaagctctgttgtgcaagaggggacccaggtgtttctcccaatcactggggacattcttgactttggctgcagatcagcatataatggcagtgtcctacttactctcagcactcaccatcagcatcactgtagcttaacctttcctgctttgtggccacataggcacagtgacacagctcctgaatgcattcttgtatgtttgtactaactacagctagtgaagtggtccatgaatgcatgcaaatgcaagcatgcaacaatggctggtccatcagagaccaacacatgagtgagctggaggtcatcaccaactaattgtacaacagtgtagattggttgttcaatgtgaagcacaatattattttcaggaaaagagttatatagaaaataaaatatatattgcccttcagcagacaaaatggtctagatggggttcaataatcaatatgaaactttgattaataaaaggggtcaagcttcggctcccatcggatggcctattcagccaaagaaaaagcaaaaatttgaattttcaaacttaattttgacattgattttgagatattttcaacgtagttttttttcagcattggcttttaagtcaccgaaaacacatatataaaagttttatctacgaaattcatttgtattctctaataagccgttttggcttattacgaaaaaagccaaacgatgaggcctgaaatgcactacaaaattgatttactttgtctgattcaatgagaattactaaacaaactgtgaatatcttgtacaacgttcttcatgtttagcacacgtgcaaactgcagtacaagtacctgactagaaaatactagcatctgagaaaaaaagggtagaaagaaaatagcatccagtcaagtctaaggagcttcgccgttgacaaggataacttgttaatcgatactgacaattgaccaattcgagataagcatgtaatatatccaacaaaaatcaatggttgcgtgcctaacgaacagaaatcggagatgtaacatatttttattatctaaaaaattcaaccaatttagaaggaaattaattacagaagaactgaatgccagctgctagtttatatgcatccagctcatgaggactgcattcatgttaattatgacggtattattcagcagaaattaattaatagcagcaggagttttggttcatactgaagtgaaagaattattgtctagctagctagttctacaaacaacattttttcaatcagagaatcataagaattttgtattgatcagtacaatgacaaattaactaatcacaaccgtagagaggcgtatagtagtacatcattacactcatttcttcaaaaaaaaaatcattacacttacacccagaaagcacacaaatgaaagagtttgtagaaagtttacggtctgtcttagaaatattttagcaaaatccgatactgttcaacaatttgggatgcagctgatcaatttactaggcattgctcaactagacaagaatgagcatatgatgataatcacacaattaatggattctgtccccaaaagtgatgtacccgtatatacgaagtacattgttctaaaacaagaaattaaaataatcggaacgaacaaacgtcaggccctaaatttctttgtcaagaaaatattgaccagatgagagccttgcttgtgcaactagctagctgtatagcttgatcataatttgtagcagaactgcacaaattaaattaaaacctaaaataatacatcttaattatatagtttcagctgcctaaaggaagaaacctctatgcatcatggttgcatacttgcattaattcaagcattaatttaggcagaacaaatatatagcgagccgtttgtgatgaggaatatatcagtaaacacactgcactgttgtgaaaaggcatatagcttagtgattacagtgacctaagtagtattttaaggtcctaggtttaaatctccatagaagcgaatttcagattatattatttaagggctaagttaaaaatgttgcatatattcagttggatgtagaggccgggtaaaaaaatacccttctctaagaaaaagcaagcacacagctggatcaaatcaaatatgtggaatatatagcaagattcctcaacagatacatccaagcaaatgaataattgattaaaaattaacaggacaaattacttgtctacataacatcatgcatggttgccttcaactttcattattacatggaacatctatttagctagccggaataaatgtataagttaagccgtttcaatgaaattaacagaagtcaggaaatgttcttcagaattatagcatcagtaatcatgccatatataaaacccagaacaaaaacatgcataaccattacttaaaaaataaacattcaaatattatatataacctcgctcacaagtattccaaaataatcaaacttggtcagtgaggaatgaagatgaaacacatccttcttgcacctgcaattaattagaaccacaccaaattaagatcaaagatgtaaaggcacgaaaaacttacacatgaacacatacatacacaaatatatgtatactacatcaaatgacacttaaaaaagaagctggaattaatggatatgtcaagcaaccatatgcaggcaggcatgcatgcttggctccttgcacgccacccagtaggcaaccagacaccatgggttggtctacatgtgtggcatacagggagccaggcacacactacacagcttctgaacaaacctctaaacctcatcatctcatccagtgtaaataaacacacatgcaaacatcacagtgcaagatagtaataaccaagagaacagaaagggagatataggtacaacacatgtttctctctttccttccatatgctccatgtagataaatatagtgaactagtgatgacttaaccagatattgatgcatacacaagctagctagctactaggcatatacacacagttgaagcaaaggacaagaaggctactagagagatagagatacatatatacagctatatgtaaatgttcagggagtagaagtgaagaacagtgcaaaggtgtgaaggattgaggtagaagaaaggaggtgaaggtggatttatagatggagcaagcaagaccagggaagatacaacaactcctctccatggctgctagctcagcagcttatacttgctctacctcctcctactagctgtttggcataaagtgaaagcaagtgcaaagggacatggagcacaagacactaggatacttcccaagggggttaaaggatgaagcttttgatgccatgccacactacacatagctaagctagctcagcagtactagcagccctacacactgcaattttactatactatatactccactgtctttccaaaaaaaagtttcacactttcaataaaacatactccctctatttttaatatatgccgtagttaactttttgagatatatttggccatttgtcttattctaaaaaatatgtaattatcatttattttattgtgacttgatttatcatcaaatgttctttaatcacgacttaatttttttgtatattcacatttatcaaaaagtcaatggcgtcatatatcaagaaaacggaggtaataccacattatatagtagcaccacccctggcaaccaatggcatattgacatgcgaaagaatttcttaattaagctccagttctctctatatatagctaatggctatatctatccatctatattgggctatatatatatatagctcatgcatctctatataatctttttcttatctcgatatatcgtgcttggccggtgaatgatgacgatgagagagctagctagtatgcactacttactcgtgttagctaggctatagctagctttgatgagttaattagcagctatgagctaataattaattaagcatccagctgctacgctggtatagggcactgttgatcagccatggctatggcgatcgatggcgactacatggagcaaaaagaaaacgaattagccttgcacgcatgcgtgcaccttcaattcctcccatacacaacaaactcagagtcacagagaagagagaaaaaagagagagagagatggtgaagactactgtaaaagttgatggctctgacctgcagtgaagtggattttgtctgaagcacttggccgagctccagattcttttataccaaacctcaccatgcatatatactatacgcccctcttttcgtttatgcttatacttatcagccaaaatttaaatttttaacattaaatttagagttttttcatcgaagtttatttttcagcctttacttttgaatcgctaagaacacgtatataaaaattttattcacaaattatttttcgtttacaagtatgccggtttggcttataccagtcagtctcaggcataagatccatgtctccctagctgcagggtgcagctatatctgcaatgtatatgtttatgactgccatgagcggctgactggtgggtccgggttatgtatagcaccccactgtcagagagaggtgagtgactacatatgtgttgtctgagtgatgtattatagttataaaaaaaggaaaagaatgatgtattatgatgatctagctagggctgtagtctgtagatagctccccaaagcgatgtaccatgagcaattggtaggtacggagtacaacactgttgatgatcatggctttggaccatgcatgtgttcatgttactgttcactccagcttaattaggggctgtttagatacaagagtataaagttttggcatgtcacattgggtattatatagggtgtcgcatggggtgttcgcgcactaataaaaaaactaattacagaatccgttagtaaaccgcgagacaaatttattaataagcctaattaatccgtcattagcaaatgtttaccgtagcaccgcattgtcagattatggagcaattagacttaaaagattcgtctcgcaaattaatcgcaatctgtgcaattaattattttttagcatatatttaatacttcatgcagacgttcaaacgttcgatgtgacaggttgaaaatttttagagtgggatctaaacatggccttatacatgttccttttgttctcgaataattgacattaacactatttaagtttaaactttgacagttttttttctttccttagaaaattgatagtgaatacttaaaaatgtattatatatcattcgagtactatatgtggcatcctaaatataatgttacagtcttcattcgtcataatataatcattaatttcaaagtaatttatagttcaagtgagacggattcaagaatggaagtactactatagtgttgtacacactgacactgacactggctagcttcttgttgaatggcatgaactgttccatcgcgtacgtctattaattaattaatctgtctatatactgttaatctcgaggggtttgagacttcaaaattaacctgcaggaagagcggccaaagcacccactttacagatcacatatgaccaccatttaccagaaaacattgttaaacaattgattagtttatcagacagctatcaacaaagatacaaaatctttctttcactataagcatgcccaacatctttgacctaacactaggtcctgtctgctcaaaataccatcacatgcatgcatcatgaccatttttaataattataagtcactcatgcagtagtcattctacctaataaaccatttgcaactaatgcccagttcttgcctagctagcttcttgcaggtctcatcagtcaccactcatattcttttgactggtagaacccagatatataagtccaatgttcaaaaattgccagctgatcatcaaggcttgcatttttatttttttcatttttgaaacttgatcaaagctttgcattggatgggaagaaaagaattagtaatagagtcatgcatgtacacctgccaatgcaaaagctagctagctaccaccaagatgtaaataactgggacaatattatatactgcaaaaagctaactacacgcacgcacgcatgaaaagatgcatcggtcgtatatattgtggacttgtggtgggttggttgatggtcatggaggcaaacccttgcagatggcttgtagcaattggtgccttctttccatgaccatgtggaatatatttttatcctatatcttctcttttttatgtcacctaaatagttataaagaaattaatagggtagattaatatacttttatatatcactttacaaacatgaaaattaagcttctaaagttataacagaaaattctaacctctatgagtagttcaaattgatctaataattgtgttattctagaggtttttcatgtatatcttggtcaatgatcccaaacttatgacataattaattgcaagaggaaaaaatcatatatgatcagttgattcataagacttttgttgccacctacaaaatattgacaggcagccaatagtctttctagctagctgtatattcagactatatacatgaacaattttgtagaggcaaaacgaaaagccccaaatctttcttttcaaacgaagatatataaaagctagctataggacagtactgaatctctctgccttgttcattccatgctttttgtaggacgtacaaccgcccaccaccgttcgttgaaagggctggccggccccggcagcatgcagctagcacgattcccattctgattgtctaatctaactaccacatatgcatgattagaacttgaacccgagcggacaggattaaaaaaaaacccatatccagttgagctacgctcacttcgcttaagctcactaatctaactaccatgctcaagctcaccgaccaactcatgctgacaatcaaacatgcacagcgaaggagagacagacaggatatagcttagctagctagcagcctagctagcactgtgtgattatatatataccaagagaaatgatcaaagttggggtagcaagctaattaagacagcatagtatcaactggatgggtttcttgtggtgaaacctatccgctcgggttcaagttctaaacttggaacgagtgcttatatctacagtactttttttcaatggtagatgatgtacctgtcgacagtaagacacttatggtaacttcgttaatcttaaaatatatcggctcaatcttctaaatgtgcttatagaaatagagtatatgtttatagggctgaatgtgcgtgcgttgtgagcgtcttttgtagtattgtttttaaacaaagttagtgaccttaaggattgagacacattgataaacaaagaaactgataccggtgtgatgtgcccaattatttgagctttaataatattgtgccacattcacttctattgttatacctatacatatacttcactacttctcacctggacacatgatatatgtccaaccaaaagtccaaaacagtacttagggtctactattgaacagtgcatgtcattcttgttggatgcttttacttcgatgggtgcagatgtcaatgatagtttaaaccatggtggtggtccttatgtttttaaaataaatggccaggttcatcaccgtattgatgcattgttgcccaatgaaaatactcctaccaagtatactcagctctatatttatgatacccaaaatgaaattcagaataggatgtgtgctatccttagtgaaggtggcgatccttctgctttagatcctgttatagctgctgagctaatgcagatgctagatgaatgcattcctttggtaaaacaatttaggttagcaagagatcatttggctgagaaggtgatgaggaaatagcaattaggattgttggctctgatgaggatggtcctgtccagtacgagttgccgacagctgatgagcttgcctgtttgattgttggtgatttttcgttagaaaacctgaagcgtgatatcattattctgaatatacctggcccattgcaccatgtgtctagcctacaccctgcttacatggctttacagcacccactgctttaatttcccctacggtgaacacagttttcaggtaggtataaatttaaggggggttgatcttactcgaaccgctatacgtacaaaagcatcaatgcaggaattccattgttattattgtcattaccgtcgtgatcagttcaatacatatttatattgtggtcggttgtcctctcaaggccaggttgactgctttccttgtgttgaggaaggtaggctaacgtacataagagaccatcagggtgattttagatgcgaaaacatttaagggattgcggatgccgttggcagaggatgcttagatggtggtgttggtaaacaacgaatattgcctacaagctttactggtgaaagaaggtacatgtattagaactatcaagatgcagtagctatatgccgtgtgtatggtgcgcctgatgtattcacaacatttacctgcaatccaaagtggtcggagattgaagaggcccgactaggcgaggggttggaggtaggagtaagcgtggagcgtacttggcgaggggttggaggtgggaggtcggtccagccgcagtcgaggaggaagcagaagccatcgacggcgagtaggtagcagaggggtccctcaccgtacgccccactcaacggagtcacctgcaccgacgttcccatccgatcgatccccttcgccggcggcggtggcgagcaagaagagttccgctcagagtggaatgagagagaaagagtccaagtgtagtagttgggccgctcaggaggcctatgcaaaaactttacatgggccaagctgaggcccatatacttccccttttgtgtttgtttcctttcctttcctagtagaggtcgagggagggttgctttctccacttgcgttgcgtccgctgccattgtcactcttctccgtctccgtctccatctccggtcagatagccccttatcgccggcgatctagaagcgagaaatcccaacaaatagacagccagagaacctgctcggctcggctcggctcggtcgccttccccttttctgggagttggcttgtttggttggatctaagcaaaggcctaacccgcggtgatcttccgcctcccatcccatggacggcgcgagcggcagcggggagccaacggccaacggggagaagaagcccgacgagcaacacttcgatcccagccaaagtaagggtctctctctcacgcacctttaatttttgttaccttttgcgttcgtgcactaggtttggttactcctattcagtactagagtacaacaaatcacgactcatattgatcgctttagagggttcagagtttgtaaactagtattggctaactaactattcgccacgaatcaaattcgaaatctcacagttgcaggaaataaacatctcctgcacaactaggaatgcacaaagatcctatcaaatgccatggccatggcctcaattttcgtagccccctggtccataattcagttcactaataaagttttctgagagatgtgcatatataggatggtagttcttgaaccaacatcacagtttattcgggatgaagtccagtatattgcaaaaaaaaattgactctgtataaatgattggagcaggtatcctatgctactagatactgaatactacaatgttatgcttgtagctaccatgctactagtatattgtcatgagtgagttatgaaatgtcaaagctttacctctccatgactttcacatagtacactggcctctttatagtacttagagatattttgagttttattgatgcattgcttgcaaaatctacaaaacattttccatatgtaaaatagttgccagcattcttgtgcttgtgcataatgccatgatgttttgaagtgataggaataatcaaaaggaaggccttgattaaagaactggctgctgcttaccatgctgagtgtgtggcatgctgtgaagagcttctgcagctccagagaaagtgggaggaggtctgtatctgtccttctccaaaatggaagataatcctgtgatttgtattcctcccattgttgtgaaacggaacatatataagtatgtaggaacacgaatcctgctcctcttctgtcggttgtgcaggagcaatatgttgaatttaagatggctgatgaagcgccgaggacgttgatggtgaagtcttccaagcgcaggaaaagatagctttacaaggcatgaatttgacaggagctctagatgttggatggatctcctacaagttaaacagaaagaagctctatgtagtttgatactttttggtagatagtcagtctattctgggtgctcgattgttttttaaacattgtactagctgcttcagcttgctaggggtatcaacttggccgctgtatcttcgtcatctatactcggtacagtactcccaccatattttaatatatgacgccgttgactttttgactaatgtttgaccattcgtttcattcaaaaaaattttgtgcaaatatgaaaatattcatgtcatgcttaaagaacatctgatgacgaatcaagccataataaaataaataataattacataaattttttgaataagacgaatggtcaaacgttggacaaaaagtcaacggcgtcatacaatatggagaatatggaggttgtatttgcttgaggagtggaggagcatgttgtttctgttatcagctacaggaagtagttgccctcagatcttttactaacacagacaaaccctcacattctttctgtaaaagcagctgggtacaatccaacctctgcaccgcgttccaaatgaccattttcgatgcttctacctctgtttttggaaaatttggaatcacgtggtcttcgaaaacttgcctccatcctgcccaaggctgattaaagtctgctatgaagacgcgatcctatgggaaatcgcttaaaagtttcagaagaaagctctacccaaggctggaaggttatcttcaatacccaaacttcaatgtaactcgtttctatgtaatccctccacccctctttctacctgttgtaatatttatttccttaagtgtaattgttctttaaatacttttaattatctaattataattcaggtggggatgaagtttttttttttaaaaaaaaagaaactactaggaggtcactattgttagtttgttactactagtaatatgcccgtgctaacgctatggtatcattgtatttttataatattccaagcaatctttatacataatattttcggtaaggttggctccttgataaagcatagtaaagctgtccatgcgaggaatatatatatatatatatatatatacatatatatatatatacatatatatatatatatatacatatatatatatatatataatcatttgaaaccatgaataccatcactccatgtcagctcataaccgtgacaacgccgatgtaatatatttcctaaaaacaacagtaatgatctttaataaacattttgaatgccttcggaattaagaaatatgtattcagtccgtcttcctgaaataaatattatgtacacaactaaggtctagaattacatcacttcctctgtttccattatgacattttctcaataccttacatgcaaaggactaagatacaaatcatacaatcgaatgctgttctggttgtcaaacgaaaaggaaaaaaatctaccaaattatttgtatggtttaaataaaaataataatagtcaattatatatgacacaaaatttggagcaagattcagaaaaagaaaacaacttgttagataaatgaacaaagctcatttaatttgtcaacataaagctctaatggtccattgaaccagttacaaccagaagattgatgtaatgtattagtagtaaattcatttcgcatatcaaattgcataaatgattgatcgggaatagaaaaatctcctagtctacaataaaaaaagacatctttgcagaagttgtttagtaagtacttaagcaataactacatggccaacaaattgcactttttcctgccacgtcagaagaatttcacactcatcaacttctatagaaacaaatgcctacgagtgtcataaccaatagtaaaaaatatatatgtagagtggcactatatctgaaaatttatttactgatcgtgcagtcggtcggtatgaaatgtgataccctcaaagatatttgatctgcaacaaattccctgacctacagatccacatgaaatgagaaaacacaaggaatgaggcactttcagtataaaaaataaacaaaattatttttatagtggatagctcacctcatcaaagcctcttagcaaattcttctgccaagggaaaaaaaactgaacatcactttttaagccattgaaaatgccagcaaactccaaccaatgtaccctcatcctactatcgcaatcttctcaggtctgaaggcaggattaataatgctgcatctgaatcattgacatgctctattcctagaatatttgacatggatgaccgaccaccaactgctgtgaagtaaggtgctcccatggtgaagtacaaattgcagtgaagtgcaaaagaaaacatgcaatttagttacaaatgtatttgagtatgcacagtaaaccaaaactgaacgcaagcaaaatgtactaacttctgctggaaagtcatagtcattttacaacatccaacattactactaagctatgaaatctcaaaaaattacttattgatggcagggagtttcaaggttggtggattccgatgatacacttaacattcattggtctttctggtattatctaatactccctccgtttcagtttacaaaacgttttgactttggtcaaagtcaaactgttttaagtttgactaagtttatagacaaatatagtaatatttatgttggagctacaccatgagggccttcggctgagtctaccgaaaccaagagctcaggcgataaactcagaccggaggtgagcgacgaaggtcgaaaaggcaaccatatgggcgaaagccacatggcgaaatccgtaactcggaatacgtggacttcctaggcaaagacctcgtcaaaaggccgcatgggcgaggatgatggggcgaaagccctggcacgaaggcatgggtttcaccaagtaccgaacttcactaggaggaggcccagtgggccgttgcacctttgagggacttcggcaaataaatgggccaagccatttggcccaataggggcccatacatgtaaaggacactatgtgccctcaataatgtctctatcataagggtaaccatataaattcccctgtaaagcctaaaccctaaaaggagggaacctataatagggctataagtagccccctaaggccatgtaatggggggatccaaaaaatttttacaaagcaatacaattattttcttttccaactactattgagagaaccacgcctttcgacgtgacgcagttgtccattcgacaacaatttataatactaaattagtgtcatcaaatcaataactgaatatattttcataataaatttgtcttgggttgaaaatgttgcttcttttttctataaactttgtcaaacttaaatcagtttgactttgacaaaaatcaaaatgtcttataacctaaaatggatggagtagtagatattgttactagtgactaactctttacctttagcactagaaaattcaataaaatgctaaagatagatcacgatattagtttagcccaaatttaaaatataacgattacattaagaaatatcatcacctatttatcattccataggcagttcaattagggtctcacagaaacaaaggagaaaaaataaggatttttagacaaatacggttcactacaaattacattttaaattaaaaattcgtttaaaggtcagtaagtatttccagtgggtggcattacaaacacatgattcagtaagtatttccaaaaccattcccacttagcgtcagtcacaatagtttttaacacatcagtgaaatcaaacttcaaatgctcaaagaatagatgggggtcttttccttcttggtcataatatggacgcaagaggtcaaataaccttttaagatcctttgattttgaatcagcaggagcagaacactggccaaccattttcagcacaacctcattgtctgctacctcccagtcacttagctcccagattccatcccatgagatccctactttgtggtttttgatcaagtgctctaggcataactgaaacacagcgcttcccagtctgctaggaagcaaaagcttggtgaagatctcgaccttttccaagatcgcctccttcttctgattcagaaactcttgaagtgttgaaatactgcaaataataacaacacaagcaaataaatcatgacaatatgaataactacattcaatgtttatttaaaaggccttcttaaaaaacaattacctacttgtttggcattaaggaaaccaagttccactttctatgtcagtcttatgttttctgactttctctgtatgggtttcatcagactggtcatcttggacacagaatatttaagaagaattgagaaaccacctgcgtcagcattgggtgcagcctaaaatagagaaatttttgttgttagcaatcaaagcaggacaatgcacagggctagaccttttgagtatagcctatctagcatactgagttactgacattgttttttcattgcatattttgaatgctaggctcaaatccccttcttttaaatggtcataattcacctagaacctaatgcgagatcatttcctcgaaattatcgctttagcttcagcagcatcgatatattttaagattgacgaagctatcacaggtgtcttactgtcgacaggtacatcacctaccattgaaaaaaaactgtaaatacgagcactcgttccaagtttagaacttgaacccgagcgggcaggtttcaccacaagaaacccatccagttgagctacgctcagttcgcttaagctcactgatattcaattgcaaatgcccctatgtcatgtacgtaggtaccaggatttaaattttgatgggtgaaatcatatgctgataaagccataactacagcactatctatgccctttttttcatgtgtatggatttcactcttatcaacctcaactaactactaccgctttcccaagatgtaagaatttttttagcggacacgattattaagaaaataggtaaaaatgattagttgtaaggagatggtaagtagataaatagctttatttaatataagatattatactagaataactttattttggaacggaggtgtagtagctactgccttgtttaggggtgcagacaatgagcggattgcagctctactcctgagcctaaagtccattacaaattacattcaaaaccttaaaatatagaggaataaagataaaattatgtaaattacactggtatatagttctaggtctgaaaaaaaaatcaagctacgtccctgggtgcagcagatagaagtgtccaatgggagtttgcatgcttttaatccagtcacactgcacggcacggcagcacattcgctttcacgtgggccgccgtttccgcaacgaaaggcctaagcgcgtgagggcccatcagatcgtggtctcgttgcgtggcgctttcctctcgacgaaacgagctggcctaaggcccaacccggtacacaggcccaaggcacatcttttgggccgggcgggaaaaaatgcgcttatgcaattccaggccttttgccaccttgctcacttttaattgcgtgtttggtagaatatatgatcccatctataacgagagaaagaaagggagaagaggataaaaaaagagaaaagaattcgaaaatcctaatgggcgatcgttcgccccgcgcggtcagcctcctcctcaacgtggtttcttttttttttcaccgcattacttttctattttaataaatttatgcaattaaagtttgtacacatcaagtttacacatctaaagtttatacacctaaagtttataagtcaaaagtttatatacctgattcaaatttgaatttgaattcaaatattttttatatataggagtatttctatacatctaaagtttatacacctaaaatttatagacccaaagtttataagtcaaaagtttatatacccgattcaaatttaaatttgaatttaaatatttttatatataatatttctatacataaagtttatacgtgcgaagtttatggtataaagtctatacataagtatagagtctatgcacataaataagagtattatatttttttctattttttatttttttttctaactttgtttttttatttttaaaaatttatggtgtagtagaaagagaataaggggaggatgaaggggggagaggagtgtgttaggggagggatggggcgataacccgcccattagcgatgcccaaaagaaatatcatgagatgtttgacaattcgagtataactaaaatctactccagattgcttgtacacacatactgaattactgatcatcgatctcacacctaaccatttctcaaaggcattttctgtctatactacttgttacatttccaactaaaaaattactactccaagtactaccaaatgattttttttttcaatgacgatggttgagtaaatctactgctggaaaaagttccatgtttctgaagatccattgtcagttagacagtagtaatcctcgacctgttcgtcttcagacaaatccttcttcagagacatctccctcttcactgcaaggtggccatcaaacctagtagtcacctgatcattctgcacatctctcatcatcttcttgtctgaataatgccgctgcccttcagacaggtggtgataatcttgatcatcatcagcagcagccgacgcgttcatcgacgccggcgatggctgctggtgatgagagctagagaagcagggaagaacttcctcataacctccatgattgaaggagatcgagctgtcaacgaggggtggcaatggagatcttgatgtgccgccattgatgtaacgaggaggaagagtagactccattgttggtgctgcaacagcttctgtcctgctcttgtagaaaaccctacacagcacccaaccctcctgcatgtactgaactattgatcaatcacaaaaaaaaaaattcacatgcagcgtgtgcaagatgatgtcaggtagtaataaatgagaagttaatcaacccgagcaagagaagatgctgaaagaattaatggcaaacaatcagtacaggttcagttctctgaattattgcacatacaatgtactgaataattaatctgtgttattcttgtatatggagagaaaaagatcttgtatacgaaggaagagttgtgcatgcatctagctagttagtcgtagaatgtatctgaaagtgacttgctagtaatagtagatgtctgatgcgtacgtctagctgccagctggcatgagagtgactgataatgcagtcaagtgcaaactgaaaacgaaatctatgggcaagaacctggtgaagcgatcaaattatttaatcatcatgaatcttcattataccctttgaattctaaaaccacatgcttttgcgtctacacaaacttactaattataacacacttgcatgatcacttgattgtgatgctggcaccaaccaagacgaccaattattataaccaaatcttgcatgtatactacgtccgtctaaaaatataagaatttatatatttaaaatttattcaacgatataaatatttagaagctctgatgccaatacatgaaaagcaatatatttttcatcctaacaggtatttgggagggaaatctaagtaattcaaaatttaaaaaggtaaccattgtggttatcggaaaagggaatatttcccccaacattagtatttgctaaacaatttagaaacgcttatactttacgagggtataatgatttgagcactaattgattattaccttgagatgatgatggtgattggcatggtctaattcttgacggaactcatgcatgacccaatcagtcctctcacccttgggggctctccctctgtagaaaacgagcgtcttacgcatgccaaccagggaccctttccgggttatctcccggtcttttccggtggccttccagtaccctgattcagtcgctctgtttgttcgttgccctcttgcgtacttcctgtccttgaggttgtagaagtaccattccttccctccaatgcaagcaatctctacatgaatgtatgtatgtacagccaatgcaagtttgttactccacatgcatttcgtttgtaataataattatttgataatttaatgtattatcatttttagttagagaggcaagagaagctaaaaaaatggacagtaatttaattcagagtttattagcacctacttccctgtttcaaaaatataagtatttctaggttgtttagcaaatattaaggttaagaaatcactttggtggtcaattttaaaaaaaatatggattgcttattagaatccccttcgaagcgtgtctgattggctggaaatgtatggatttccatacattagaatcaatgtcagaaatatttacattgtggtataaattttcgaaaatccttgaaaaatacttgtattttggaatggtgagagtaattagctaggatatatgaagaagtttctagctatatataggtcaatgtttttttgggtacctcacacactagggatgttttaacaagcaaaccggcggctttgctttctgcaacagtctctatcttcagtttctctctaggttcaggcaaaacgggaggatatgctatgggtagagaggaagctgccaaacaaactctctcggcaaaaggaataatattcagtctgttatatgatgtgatgaggaagacggcgacgagtcaacaagcaggcaggcgagacgtgtaaattttgttctcattatagatacatttttcgataattagattgcatatagcctcatgaacagaaaaaaaaatataaatattagggaatgacctaatatcaaataattaggtctcaggtcatctagcccaccaccccgtgaagctagccggaagacccctagacgtttctccttacgaacagaaaaggttcaggtagtttcttaattgtggaagaattaaattcaggtggattaatttatcagtggaaagaaatgagaaattaattagtgagctagctagcttctgaaatttcatggatcgatcgagttaatccaattccaaaatgcattatcgaaaataaattccaaaataccttttgtcgatcatgctttgtctagtcacggtaaagaaaagaaacaacttatactacataaagtttgaaatcgaatttaggtcagctcatggagctagagatgagttgaatcggtcacctcaacaaccatgcttcgagatgcatgaggaactaatactactaaacttgcatcacatgcattatctaaaaagaaaaccttaatgttcatcttacacatagaaaaattgaaaaatttaaattatgatgctcacgaatattatcggccccatcgtttggcttattcgtggaataagccaaacatcatatttgcaaacaaaaaataatttgtgaataaaacttttatatacatgttcttagcaacctaaaagtaagaattgaaaaataaacttcaatgaaaaaaaacctaaaatcagcttcaaattcaagattgaaaattcaaattttacctgataaacataagtataagcgaaaatattaggccatatgtgtatggagatatgctttcagcaagattttaataagattgaggatgtgacgctggtttttatctctttaaacgtgtattacgaggtgcattcgcgaggtgcaagtgtggtgctacgtgtgtagtggtcgtgtagtgcagctgacgtgtaatcagaaaaaaaaaataacgtgcatcttgcatggacacaccaccattatcatcacgttgcatttagtagaaaatgtaatacagaaaaaggctacaaacgcccaatacaaaatcaaggaaatatgcatcctatagaatcaaacgttaacgagaataaacaaaaacatgtaattaactccaaaaaatgtcttaactcctatagaatcagacgttaacgagaatcaacacaactatctataaactatatcagaaaacaaacggttttaccctgctaaattaaaccaccaataattacacagctttacaagtgcttgtgatgtggtagaaatcaagacaatttactagctagcaaaatcatgcaggatgtatacctgggaggtcccatggctcgcacttgttgagatcgacgtcgatcagtgtcggcgtcgggcagccggcgccggcggcgccgccgccgctcgccgcgccaccgtcgccggagcggagcttgccggagaggtagtcaaccacgagttcgtcgtctcgaggatggaatctgaacccgggaggcagcctcgcctccaccatgctcaagctcaacgaccaactcatgctgacaaccaaacatgcagagagaagaaggagagagacaggatatagcttagctagctagctagcactgtgtgattatatatataccaagagaaatgatcaaagttggggtagcaagctaattaagacagcctagtatcaaagatagattaattagttgaagcccaagtcagaaacttctattcgtgactaatcatggaattgaagagatggaggttgtgtaatactatctccgtattttaatgtatgacgatgttggcttttttccaatatttgaccattcgctttattcaaaattttatataattattatttattttattgtaacttaattcatcatcaaatgttctttaagcatgacataaatatttttcatattttcacaaaaattttaaataaaacgaatggtcaaacgttgataaaaagttaacggcgtcatacattaaaatacggagggaatatataagaaaagtctatactacaaaactttcttacataaacttttacaaacactgatatggcatggtgtgtaaataaatctatatttcctgtaactaccattaatattatattttgactaaatcaaacggttgagagttttgtagatgtagcagtgttagggtcgggaaacaaaatgttgtccaactgtccatgacgcaacactgtcaggcggctaacgtggcatgcttaatttggggccttaccatctttaacctgcaagttctacgctgatattgacacttgtatcggcactaccatgatactactatccatgcacgggagcgagagaaaagtctataatttgttgcacctttctaacaaatcagaatggttgatgaagaatattaacagcctgtggaagacaccaaaccatgatcactgaataattaagatgttggaagcatatatacctgaaactgaataatctttaacctgcaagctgaacaggccagagcacctccgccgcaaagcacacggcatgctatatctgacaaacaaacaagcagtttcagtgttactgataattcttcctagagtgaatttgagaacaatttgcaggaggaccactcgtcgcgatcactgaacaattcgagttcatcagtctccacgttgcccgacgcagtgcattctctaaaaagcttcagatactctaacgtcgcgatatctaccgttttggtataagttggttgcactcgttcaaagttgatcagcttcttcgaatttcttctaatgatgattaattagcatccaatggtttgagttttgctgacttcagcagatcattcgtcaaaacaacgacatatacctgaaaccgacatagacgtgcttcaaaaatacctgcatttcagtctattcttgccccgacatagacgtccttcaaaaatacccgcatttcagtctattcttgccgaggtgaagtataaacaataaaaaaaggaaactatcaactcagagaatccaaagtcaggatgcatattttctactattctagaaggaaactggagagaaatctgatggccttatagacgtttagctcagtttcagtattactcccttcgtttcacaatgtaagttattctagcatttctcacatttatattaatattaatgaatctagacatatatatctatttagattcattaatattaatataaatatagaaaatattagaatgacttacatattctgaaacggaggaagtatcaggtaagatctgaacagaaacagcctgagagctgataccattaattggtagcgaaccatatttgggcttgcccaaacgtgaagcgtgggcttggattgtgcatcggacggcccatgaatttgggctcctactccgactgtaagcccaacacggcctgcagaaatgatcatcttcgtcctaactgaagcttacagttcattattattagcactgtctctttaatctctagctagcccagacatgattatgagctggaagaaatttgacaaagcaatctatccatccatcaatccgttaattcctgcgtcaattttggcatcctgcaggttcaacccccgacacggtacgttttgtttaagcaaaagcacaggcgacaaagccaagccaaagattaacaacaaaaattgttccttcctagcagtagctgcatgtaaaaaatatacagctatatatagattatctaggagactataacatcattcacatgccaacatggctagctacatctctatcgaccgaccggccatctatctcgcgatgtgtagagctataaacaaacagctcttggcttatgactgatcaacacggattagcagcttgattagcgtagatcgatccgtcgtcgagggagatcgatcgatacggttaattagggaaggaaacgtttagacaaagcgtagcagcgtgtcagtgtgactcagagcagcaggtggctggtaaagttgttaaatatgtgtatgcatttagtcttttaacaaactctaaaaaatacataagaaatcctgctaaaatttaaaaatattactaaattgctaaaattttgataaaattcattttaactacaatctgaacatgctgtagtaatgaatggacacacacatgttattttgtctggatggatggtgcgagtaggagatgagccgtcacatgagttttgtggctagctacacgggactggatacctagtctagtgtgtctccacgccctagtgccatttctttttagaaaatctgcaccgatccatttggagaaacagagaaatgatccaaactgtgatcgatcaatgcatcctcctcttatcaacaatacctcctccgtctcgtattaaattcaattttagctatttctatttatcttaaaataaatttacttttaaaataattatttgtatcgaaatttataaaagtatgaaataaccgtattgggagtagataaagtgagagatagtacgtggatattctaatctttttgttttttattggtatacgtgggatggatggaaaatgaatttattttgtgatggaggtagtactaaactttgatattgctaaattttactataataaggtactccctctgtcccataataagcacagttcccataataagcacagttgtgggttccagtgcccaacatttgtctatccgtcttatttgaattctttttataattaatatttttattgttattagatgataaaatataaatagtactttgtacatgacttaatttttaaatttttttataattttttcaaataaaatggacggtcaaatattggacacggaaatttatggctgcacttaaaataggaatgaatgagtataattattgtagtattagtattttattatttgtcaaatgtaagtcaaagaccacaattattaggaatgaatgagtataattattgtagtattagtattttattgtttgtcaaatgtaagttaaaggccacaattattgtgccttaccatgtactcctacgtagttactgtgacttttttgtgatatttaaagttttgaaatttcatttttcggagatgaaatttacgtggttttgtcggttaccatggatggttgacaacctccccatggacggtatttgcaaaagtacgcctagtttgatgcccacgatggatgtgcagccatagctaagggaaccgaacagaaccccatagtatttgttcctccctccgtccagcgttatctttttaagaaaaattaaatccagtaacatttgactaataactatactaattatatatatgataaatattatgtatgttatatcactgaattcatattttaaaatagtttcacgtgatgcaaattttatacttggttggaacataacatgaaataaattaattatcaaaacatatcattaaaaaccgtgtaaaaaatatagtatgcctcataatttaggatggagagagtattattactactactcctttcagttatcaaactcaacatcacacatactccacctgttccaaaaaatataaatatcgtactaatcaagacatatattatggtactatattggtttttttacagagagagtatactactaatacttaattatctctaccctattcagtagtagagtagaagtatgcaaaatttgtcatatgatcaaattttggtgcggctaattttaacataaaaatgaattgtactactgcatttgtttgaacgactctggaaacgcgcagatgatccaaacatcgcttgccatttcaccgcaattcgaacagtggcactggcatcagtatcaccaggatgcaatgcaatgcactgaatcgcagcggccgtggttgcagcgaaacaggcgtaaaatcgtctcgtttagcgagccacacagctgatcacatgtgcgtggatgtgcgcgcgcagcaaaaatattcgccgctaaacgagaaagcctaacctagggcgtaggctaggctgggctactgctgcttctgataacgaatcggttaaactttagcccatgtctcataaacataccccctccgtaaaaaaaaaaaaaagttaaaccctagatttccgtgtccaattttaattgtgcgtcttatatgaaatttttttataatttatattttcattgttgttagatgataaaacatgattaatattttatacgtgacttgtctttttaattttttcataattttttcaaataagacggacggtcaaacgttgggcacggaaaccagagtttgtctttttttgaaacagagggagtaagtctctagaggagtgacttatgcttctgtaagagggacactttagtccctagttcgcaaacaccccctatgcctaaacggagatggatccatcccgtcccattgtgtcatgtcgtgtcggctacgtgcttcatccattttttccgttgcatcgttccaattgcatcaaggcttggtggttgtgtttagttcatttcaaagttgtaagtttgggttaaaattggtacgatatgactgaaaagttgtgtgtatgacaggttgatgtgatggaaaaagttagaagtttggatctaaacacagccttagttactaactttttcctcaaacttctatttttttatcacatcaaaattttcctacacacaaactttcaacttttccgtcacatcgttccaattataacaaaacttctaattttgatgtgaattaaacacacccctaagcggagattttacttcagtcatcgcatttgtgaaaatttagaagttttaaattgtttggatacctcttgtaagcatacgattggttcgaaatgatttagatttctgagtatttggaattggtgtgatttgtgcagttgagatcgttcgtttagataattcatcggaaatattgttttctccgtcggcggtataattctgatggaggaagcaaactttccgatgaaaaacgatgggtgagataggtgagagatagagtaacatcttagcgtcccattgatttggagaaaataattagaattttggagaattttaatcctataaaaaaaatcctatgaagcactttgaaacaaatgattgaatcctattcaatcatttgaaattcctatggaatggacatttctatgtagattttggaggaaatatagcaagagcttcaacctcttggtaactttccttggagtctacctctctcattcaattcctgtgtttttcctgcggttcaatcaaacagtcattctatgtgtttttcctacgttttgcaatcctctattttacacttacattcctatcaaaatcatgttttttcttattcctacattttctcaatcctgcgattcaaaggggcccttagtaactttctgaaaaatgatactccatccattccttccataatataagacataactaatttttaatttatttcatcataatatgtgacgtgcgtgcatgtcattaactagcacatctttttgactaaatttttttatttaaatattttactatcaagatctctaattttattaggtgcatctattctatttattagggtaatcctaactatgatgtgataataattatttactcgtctttggattaagattggttatatatcttatatattagaatggagagagtatactgttccttctaaaaaaatggagatagtatactttattgtggataaaagatttgcgcaatggtggcagaccagacggtagcgtccgcacacgggagggcaaactgccgacacgacccctccccggcgctcccaaccgacgaaacaatcacgggcacgattccttcgctactgtgtgactgacacgtgggggccaccgagccagttatactagctggacctatatcagtactccatccgttaaaaaataaatagtacatgtgacatattatagtaatacgtatttaaacagtaagagtgtttagttcacgtcaaaattaaaaatttggttaaaattgaaacgatgtgacgaaaaagttagaagtttgtgtgtgtaggaaagttttggaattaattctaaactttttcttcgaacttccaactttttctatcagatcaaaactttcccatacacgtaaacttccaacttttctatcacatcgtttcatttttaaccatattttcaattttggcgtgaactaaacacacccaaagttataagtatctagattcgtagtactataatatttaacgtccaatactatattattttttttattggacgaagaaagtactcagtatatcatccacacgtcgctctattctcattgacgtgattactccattcgtttcgttctaaaataaacttatttttcacttatcctgtaggtagaaaactaaattatcctcgctttactaaattccaatgcaattgtatcgctttatttgtttccaatgtataacttttccttttttttacaaactatcactatcccgtctcataataagtttattttccatccgttccacatgtatcaaaataaaaaaatgactagtatatttctactttatcaaatccaaatgtaactacttcttactttatcttttagtacaattattctctatttttatgaacttactttgggataaataaaaggagcaataaataaacttaataagaggttgaggaagaggaaatactctacaatgcaataagttattcaaaggaaagcttattttcggataagctcaaggagtaaaaaataaacctgtttatggagaggctaaggctgtatttgcaacccctgttcccaacccctcttatttgttttccacgcgtacgtttttcaaattgctaaacggtgtattttttataaaaaatttctatacaaaagttgtttaaaaaatcaaattaatctattcgtttttcaaatagctaatacttaattaatcacgcactaatggaccgctccgtttttcgtgtggagggaataagttcccattcaccatatgcgaacacagtgtaatgggacatcatcaatgttactataccatcatattgaaccatggcttcaatgatattggtgtcgtgaaaagatctatttttgaaataagttctttttttttctaataaataagttttcacaatggaatagtaaaaggtgaaaaatccagggcaccatcgctggcgatcgatgcgccttgtgcctggctctggttgctgcgactgcgatgctcctgcggcgttggcagatcaggtgatggatggacggctggctggctgacagctccaccgatgatgggctgggccctcgagcgccgcgcgcctccttgacttgaccgtctaccacgaccctccccctcaaccctgaccggtgggtcccacacccacctgtacaacccatgcctgcacagtccacggcactgtaccgtccgttcttccgttggatacaccaaccatcatttgacaagctcgtcgtgtcgttcgttacaccatcatgccgaaattgccaacccattcgtcgtccacgtctactccctccgtctcaagaaaaaaaatatgatatgttctaatacgataaatctggacagatgtatgtcttattttataatactagaatatgtcacattcgatactaggttgattttctttttggaacggagtgagtacgctattcattactttttggatggagtagtacgtactagaactatttttatcataaaatataaataactttgattagatgtattactatcaacccgaatagagtctatctagaggcctatttacatcgtagctaaaataaatcttattaaattttaatatagatggtaatattgttaaaattttgacatgatttcttatttatttactaaatttagcaacaaattaaacgtggatattttttttggcacctttaaaaaaatagtatggttaaaaatggcatcaatctaaatatcccctatattactctaattaagatcttttatattttgaggatggattacaaagaaaatgaagcagccgcaaatggtacacggaagaaaaatgggttgtttatcgggccgtgtaagggccttatcatttgccctatggcttataagacaaagctcaaatttgaattttaaaacttaattttgaacttgattttgatgctttttcaacatagttttttttagctttggcttttcaatcactacgaacatatatgcaaaaattttactcgcatatcattttttaatcgttaataagccattatggtttataataagccattaccaaccgatgggaccataagacatgccgcgtcgtactccgtactagtactcctcccgcaagacgacaagattatacgtgcagcagcaacgggagatcgaagagggcgcaatgtttcgccacgtccgtccttaccatcgtacggccaccatccactcctcgctcctcgttacgattcgtacacctactcgtactccactcgcgaccgcgggtgcaaaatcccggtcataccctcctcactgacaggtttgaccgctagggttaaccgcagaagacgacaaaacgtaaagggtagcgtcgtcttttcaagtcggcccaaatgattgacgtccccgtcctctgtcggccaccgtggcgaaattcatcttcttcccaggaaggatggacggtcggatccgatggcggtttttcttcgcagtgtctcgaccgtccgattgcccgggttcgcgaccgccaaattgtttgtttggcgccaaggttttcccccctcctcccgatttgggatcctttacatcctcacccttcatctcgtgcacaatttcaaccatatccctattcaaataccgattcatcaaaattgattcaggccgtgtttagttctacgctaaaattacaagtttgaacaaattggaacgatgtaacggaaaagttgaaagtttgcgtgtagaaaaattcaacgtgacagaagttaaaagttcgaagaaaaaaagttaaaatctaaacagggcatcacttcaaatatttagtgattgtagtattattttggaaaaggagggggtgaagcgtaaaatggagctgcacggatatccacgagggggggcggcagcgcctcgcgggccgcgcttgtcggtgttaactccggccgccacgtggagcggccgccggtgatcatcgacagctggatctcacgtgccgctcccccctggcgccgatctctctgcaccgtcggatcgtcgccgacggcccggatgcggccccacgcaagcggataagggaaagcctgggtggtgtggtggtgggccgtcacgtgcccctccccaccctcgagtctcggcgtggtcaacgtggggggagccgatcaagtaaattctttacgcccagattaggggtgcttggatgggctaaaattttttagctcatgtcacattggatgtttggacgctaatttagagtattaaacatagattaatagaaaaactaatttcataaatgagagctaatccacgagacgaattttttaagcctaattaacccataattatcaaaagtttactgtagtatcatattgtaaaaattatggcgtaattagactcaaaagattcgtctcgcgaattagtctaatgttatgaaatgggttttataattagtgtatgtttaatactataaattagtgtcaaacatccgatgtgacaaggacttgaataagtttctggaaaccaaacagcttcttagagagccgttaaccagtaaaaaaacgtaattaaaaatgcaattactgcgctaactacaagaaagtgtaaaaaagatgtagtacagatagaaatgtgcataggcttttttttactacacgagtcagagaggggctagtgtacaaaggtggcttttgagcatcaaacgggaggcagtagtcactcacacgctcacacgtgctgtacttaactttgcatgcgatcccatccatccatcacggcggacgtcgccgtcgtggttgtcgccgtcggcggtcgcatccgtccggccaaatgtggcatcttttcacggatcgcccatctcgtcgccgatgtcggcactgttttggctcggcatccatcatggtgttaaaactgtgtggtgtggggtctcaccagactgtgacacatttttcccaccggctaaccacttcacccctgacagggtaaatgctggttaaaaaaacacatcacacactagtaatagtaattatctttcttaagggccctttcatttgtaaaaaaaccatatgaattttgagaggatttcaatcttctaaaaaaattcctatgaagacttttagaacaaaaaattgaatcctataatattctttggatgaaacaattctataaagactttaaaaaaattagtaaaagcttcaacctgttagaaagtttgcttcgagtctatatttctcattcaatttatgctattcaatcaaacaattattactgtgtttttttttgtgttttaccattctttatcttatatttatattactgttaaaataggtgtttctttctattcatttgatccttattattaaccgctgttgaattcagcaaactgattctggtttgtcgtgtcgtgttgataccgtgcagcgtaacgttactctttaccccctgctgctgctgcagcatgtcgcagcaaatatattgtttaatttaatcaatttgcctgcaaagacaacaaccacgccaaaaatttttctgaaacagagatgggagtagtgtaccaccacacagtggcagtggaaccacctaccccctgtcaaaaaaattaaccacggattaactcccccgtttcaccttgcatcccagaaaatccacacgccgacgtggcggcctgtgattggttggctcgacgtgatgggccccgtttgtcagattatttaccgtgcggggttatatataggggaggttttgtttaccacggtgtgctttgctctcttgcctctcctgtctctttctcggatttttctcatcgaatctctccacttcactagccaaaagtacagtaccaccagtgtacttcaccgtttgatgcgcctcgccgccggcaatggcatccgccgtcgctagcaccatgccctcgccgccgccgcccgccgtctcgttcggctggctcgcccccacgcgcgtgtcgccgccaccggcattgccggcggtggcggtggcggcggagcaggctgtgtcgaaggagttcattgattttgagttcagccttggtggatctgcgaccatgttgccggcggatgagctgttcgccgacgggaagttgctcccgctccggccgcatccggtggcggcggagaaggcggtggcgatggaggcggagaaggcggtgccggagctcgtgaaggcggtgcggcctgcggtggcggtggcagcggaggtgttcgacccgtacgtgttctcacccaaggcgccgacgtgctcgagcaggtggagggagctgctccggctgaagaaggtccagacgccgacgaagccgtcggcgtcgacgtccgcatcgccgtcgacggcgacggcggcgacgccgtcgagatcctcgaactcctcggcggccaggtcgctcaagctgctgctgctccagcggaacggcgggcgcgcgtctggcgccgccgcgtcggacctctccgtggcgccgctcctccgcgacagctccgactccgaggcgtccctctccctcgcgtcctcccgcttctcgctctcgtcgtcgtcgtcgtcgtcctgccacgagcacgacgacttcccccgccactccctcgactccgtcgaccccacaccacggccccgcctccgcctcgtccggtctcaaccacagccgcaccctcctgccgccgccgccgccgccgccgccgccgttgccaagcctcgggcggcgatccagagccccgcccggcgccgcccctcgccaccgccgccgcctccgccgcaggtggcctccgtggactcgccgcgcatgaactcgtccggcaagatcgtgttccagggcctggaacgcagctcgagctcgccggcagggagcgtccactcaagcctccggtcgcggtcgcgcgtcatggacaggtcctactccgctggcgtccgcgccgccacccccgtcgtgctcaacgtgccggtctgctcgcgcccggtgttcgggttcttcaaggacaggaaggacgcggcggcgaaggactcgtcggcgtcgcggcctcggtcggcgcttggccggaagacggcgccccacgccggcaatggcggcggcgcatccagagatcttggtactagcaactgacctccgttttgactaagctagaagcattagcaatgtaacctcaattagccagccaagtagtcgtagcatttcctttccaaagaaaaggaaacaacaaaaaaagaacagggtgagaggagaaatttagtttgggatttggagtgaagagaaatttcaaatttggaggagaggatagattgttttgtgaagtcattttgcttgatgttttgggagaggatcctagatatatcagaccaagctaattggcccatccattttgctcattctcatctcatgtaaatccaatctaatcttctttgcaactacattttgcattctgtttctgctttgtactacatttgatctgagctcgaacgaagagaaaaacataaaactattgcacacgctctattcttgcagtaaaaccccaaatgatggtttcatgtgcgtttgacaaaaaagactgatccttttataaaccatggtaacttttcaccttttttacccggcctcgtgggcattagttttactgatgcaaattgatggagatcgatgccggtttaaacagtgggcagatcggagagctgggcgccagctcgtccaccatgtgtgccggtgatcgggcacagtgctgcgccatgtgcggccatctgaattctcgtgtaaattgctcactgtggcagtaaaaaaagagaggaagaaatggaacggatgatgagtgagtgcagggctgctgcgaacagcgaaacttttgtgaaggaaaagggcccattttggagagagcggtggattgctattgctggtctcgctttgctgttttgctgcattgctgctgcctgcagcgacggaggcgctgccaaagttgggtgcccatgtggtctctctgtgtgtgtgtttgagttttttttttttttgctcgtctctttctttggcttcgcagtggcaaagcagcttcttcttttttttttactaggattttcttttcgtgttatcttttctactgctacagttataagtgctgcagccaccattggcctttgcctggttgtttttgttttccctttttttgactcgtgctagtatagctttactaagagcaggtaattataagccagctgcaaacatattttaagaagataaataaggagagagaagggcagcggactatagatttatcgccagctgtagcacggactccaagacgcagtgtgtatgacatgtgagaccacgtattaatagtgtagtatgtttctattgtatgaataagctattagattagctataaatgaattggagccattagttggctatactattaaacttgctctaaaggcccctttaccttcttagtttttgtacaagtttggtccgagtgttacgtgtagattccaacttgacacgaccctagccaacggtaggggtactagactaatagtaggagtaggattttcactgcctcgagcagcagtgaacatttgaccgcagtaaaaaaaagaaagacaaggatcctgagaagagagagagatatgatgtgatgtgatgggcagcgcaggattctgatctgacggctaggattctcgtgcgagtgaattcctgcccctctcccgggaggcacagccccctgcgcctctgccgcaaaatactccctactccaacattattttttggcgccaaataccggttagtttttgtccatgacacgctctaatttggcgcctaatttgcgtgcaaatttctcttttgaattcgatctgatccagcccaggaatggaggcccacgtacatctaggggaaaaagtacaccgaatgtccctcaacttgtcatcgagttacaaaatcgtcccctaaccgcaaaaccgatacaacgcatcctccaacttataaaaccactacaaactaggtccctcggtggttttgaccccggttttatatgacgtgtcggctgagtcagcgtgggacccacgtgggccccacatgtcagaatgcaacatcagcaaggtctctctcccctgccacgtcagcaaggtctgtcttccctctcccttcctctctctaatctctatctcactcttctctctgggcaggccgtccggtggtggggaggaggtccgacggccggccggcaatgcgggagaaggggcgacgcggcggcggtgggccgggagcaggcaggaaccgcggcggtaggcgcaggggcgacggaggatggaggaggacggtcggagcgaagctcaacgatgcgagtcctgtgacgagcagccacttgcgataggggcgacgacgctcgggcattcccagattggcccggcacgactgccgctctgattgagaccagtggaggcggctccggtgtgatttggtggcgagtaaggacggagcgagctctgcctctatgtggcggggctagggtcttctagcgacgaggcggcttagggtgagaagcccgtgggcggctgatggggagaagaggttgttgctgagcttgctcgagcgggcggccgcgggcggcatcatggttgggacttgggggcgcggctaggcgagggagaaggttgttgtcgagcttgtatgctgttagagaaaggagagagaaaatgaaatcatgtagctcgaatttgtatgctgttatttgatagtatctgcaggtatgagtctcgaagttgatgagcattcgatgattaaattttagttgcattgcatcttcaaacagtccccttagttcgtgcttatatgatttatttacagaattgatattgtagtgtttgaatgtattcaggttctgaagagttcctggagcttattaagagtgcgcttctggcagcactagaaggttactgttttgaacgcttgaaacttactgaattattggttgcttgaactgcgaattgtgagcgagtataatttatgttgctcctcagttgtctttttctctatgcaacagctctgattccaggctccctgtttagacagtatgatgtacaaggtccaattccagttgtaaaagatgtttttatccctccagacacagaagaagatgggctgcctgctgcccttgaagatgccatgcctctaatttcatttttggcccctctatgtaagaagtgttacagtttgtttagtcaatttgaacatgtaataatgacaaagataaatttacaagcagatcgacacatgcaaagatcgaattgctgctgcccttgatacattgcgatttacgacatacatcttcgtgggagcgaggtgctgcttctgggcaggaaactgatactgttttacttggtggccgaggttttggagcagccatgtctgctctaactgacgccctcccccgacgtcctgctctgctcccgccgtcgcctcgcccgtgtgaagccgctacacgccgagggcgtcgctgccgctggagccgggtccacgtcccgccgccgtcgaggtctcccacaagccacatccggcggagaggaggcgcccctcctctgcccttttgctgcctgacccaggcgtggtggcctcctcccgtcgcagctgccgccgccggttctcctcctctcccgcctcgtcccgggcgacctcctccccaccccacccgtcggccggcttgcccaaaggagaaaagcgagaaagagaggagaaagggagagagagagatggttgatgacgtggcatcctgacatgtgggtcccacgctaagtcagccgccacgtcggataaaaccgggatcaaaaccactcaaggatctaaagcgaacggttttgtaagttgagcgatgtaatatatctggttttgtggttgagggacgatttgtaactcgatgacaaggtgagggaccttgggtgtactttttcctacatatctaggcctcctcagctagagggcccaattagtttttagttgggccatgcccaattggtctcagttagttgttgttcgttgagaaatgggttgatctctagtagagtaattaatcagctactaggagtagtatactacccgtgaaattttacttaattaatttatttactaaatactctactagagttcaaaggaaacaagaaaacctactaattaaggcagggtggaattggagagaaaggttggaagtttaggactttgttttgtctcttttgttgctgctggatactgtttggaggcctagtgcctagctttatgttttgctgtttggaacatgtattgcgagcttaaatgctcagactatgtaactttggggctgcgtatatcttgtgggaagtagaggtcttttttttttcaaatccattatctaaagaaaaagaaaaccatttgtcagattccatttctcttattattcgtgaaaattttaggttacaaaatactcaagattaattaaaacgcggaccaggccattagttcgaaattgggccggcctgcagccgtgtgctactgatcagtctagcaggccgggggccagccatgatcagaagtaaaaattaggagcataatatgtcatcatctcgcctcaggaaaactaatcatacaagttacagtacgaggccaacattttcttctcggtcgcgttcaaagaatcagtctaaaaattccaagttgccggatgcatctaaaaatctgtcatgttcttggtcctctcgcggctttctcccattggttcttgtagatcggcgtcatcgcggtgaactaatcaaaatatacgacctgccagttgtacgtacgttcctctgtcatcttctcttcacagtgaagatattaattgtacctgccatctaattaagaaaaaaaataattataagaaaaggaaacctcaccaattatcaatgtccgaggaaacctcaccagtagtattagcaaggaatttcgtgtaatataatagcataaaactgatcaacaagtcacatgtttggtttctgactagttttctagcactggtttcacggtcgtgttcgtgtataacatgctaagcttagctatctgcgccctccaatccaccaggtcaacgtacacgcccaaatccgcaagtgaagagccatatcctagctccggccgccgtcccatggcttcgccgccgccgggggcactatgatctatggcaatatgcacagacagatcgagctgggagagctcatctttttagcctcaggtagcagagctctcttcgtttgttctctctctgcatgcagtatatactatgttcctagctagctaccacgatctatatatgtatgtgtgaatatatagttgttgattaggctaagacagagatcaggtaacaaaggttgatggtattgattgctatctttaattaattcatgtgctaattgtgatttccttctctcaggttgattaggctcaggtgcagagacagcttgtagatagctcgaatgatatgacgacgtatatatgcatgaagaagaacatcaggatcaaggaagctacctttatttgagcttcggaaaaggcagttgatattttggtacatggagatgaatgattagagccaagtgaatggtccaagcacttgctaaattcagtacatacccctctgcatgccttaattttgtggatctctcgctcgatcagcgacgtcggtcgtcatctcgtcacaacatgggattgattggtgagtggttaatattttagttattactaatacagtactctcccttttgctctatcttttcgctgtttttgctattcgtctttttatgaggatgtgtttggataatgggaaatgaggggtgggattaggattggaaaatgaatgaagggttagaattaaatggatgagggagaatgaatagttaggatttaaagataggtgggaaatcatttccctggacatttgccaaacactgcctgaatggtttggtagtttgatctcctcggagctgagacttgtgtgtcgatgttgtttctttgacttgtgactctcattggattttcttcccagttcgggcccatcctaatagagatggtgaaagcccatatttgagcccatttgaaccgagtttgttatttgggctgatgttgggccgtagcccagtttcaatgggcccgcatgaggtgtgctatagtacggcgagcataataatcaccaagttcatttcatctagccgaaagccatgagggtaaataaaaagatcgtcgtcacattttacgaggatcaaatttaccgtttgtgcgtaagaactgcatgagcagcggtaaatttagcaatttccaagtgctttcgagctccgatcgcttttccccttcattttaatcgcgcgagatcaagatcgatcgaaaccctagctgaccaagcggatcgccggatcgaacccgcaaaacgcgcgcgcgccaccactacgacgccatggaaggcggcggcgaccactacgacggcgggcacctgccggagctcggcggcggcgcgccgttcttgttccgcagccgcaccatcggggtgggcgccatcttcctcatgtggggggcctccgccatcgtcctcggggccgtccccgagcccgccatccccatcgcccacatgctgctctccttcgccttcctcatggcgggcgtcgcgctgctcaccctctccgtcgctgccccccgctgcgccatggcggcgagggcggcggcgaccctggagaactggctcacggcgttgatctagggttggctcgatccgattagatcagatcgcgttgatgagtagctagcccaactaattaagccatatatgcatctctcgctcctcgatcgattcgagtagcttattatggagtgtagcagttaattaattaagtataaactgtttgtgttgttatgcaactagctatagcttgatgtgtgatgatctaattgtaaatttgtaattaaagagatgaatgttttttttaattttctgttgttaatgtactgtgcatgcagctgcttgatagatgtataatttatactatatgtattgttttgtggtgtataaatatatatattaagcttgagagtgagttgccaatcttcaatattggttgcattgtcataaaatttagtactgtctatatatacttcatgtcaacttcttaaattttcagtagtattttttattatattgatatagtttcaattctttgcagtcaaaacatgcatgaattgtttaggtatgccggccacattagtttcatgggacaaacgaagattgcgaggtataacaatccggatatttatacggttatcagatagtacaaacaagtatgactgatatttgcaattggactacctgatacaattgccatgagatgaatcttcaaaagcaaacatatgtcttgaatgtccggctgggtactgtgtggatatgtaaatatatagaagcatgatcagttgattacatgcataatgatcagagagagatgaagctggcttgcataagtacactacagatcaagagcagggaatttttcgtttttttcctggttacgacctttcagggttgtaatcttatactctatcaatagaacttcgttaaaaaaaagagcagggaattaacaaatgcatgagaacgcagcatggtggaaagcacacgatgctggtgagtatgcaaatgtacattttaatgccccttatttgttgcattgcttaattcctagttttagccagttttgccaatgcacggtgtaagttttaagagtaaattgcacccggttatttaattagcatagaatttcactttgcacccggttattaccacagttgtagtgtgagcatcttaccattaacagaggcagtactatgaggacatgcagttgattaggctgcaacatgttgatatatatcaatggtatggctagctagtttctgtaacacatagggcatcccactatctgtaattctgtatgcaatactgaactatatgctatgctagcttgtaggacattatatttggcggaacaattgggaagtgtctgtttagtccaataatggctttaattagcacaatattgtcctttgggggtgaatatgtattctgattatctttggagattttacagttgaagtgataaaatgaaggatgcattatgcataggcataaattcatagccccagctgcctcaattcactaactaatacagaacgtttaggtgtacaatcatccatttctcatcagccctctttcatggtgtttatatatgtgtgtgttgcacgtgctcagtttatggatgatctagcaacagctaaaatgatactacggattaatattgctttcctatctgaaacaaatagatcaggcaatacacacatcaatcgaggagtcctaatacattaattgttttatgatgtttatatatgtgtggggaaacatttagctatttaggcgtctatatatatactccacgtataaatatgcaatgtcaaatataacttctacaagttgcaacgaaaaaaaaataaatttagctataaatatacgttaactaaccatagtttaatttgttttttctgttgtaacttgtagaagttaaatcttaacttgtatgtttgtggaatgatttatcatgtatactaatctatcttgtttttttaaatttttttcataaccatttggatgacatgcaaataacaaaatatatcctctcaagagtttagaatctattccgcttgtgtgtcatacattaattgtattgtttatgctctacttcctcattgcgggagtcaccagcgtcgtcgccggagctcccgaccggaggactggaagggtgtcattcattgatctccctcttaaaacaataatgctaactttgaagtttctaatcatcaacctacaatctgtctacctatgctaaggctgtgtttgcaaccccttctttccaacccctctcattcgttttccacgcgcacgcttttcaaactgctaaacgatgtgtttttttaaaaaagtttctatatgaaagttgtttaaaaaaatcaaattaatctatttttgaaaaaaaaatctaatacttaattaatcacacactaatggaccgcttcgttttccgtgcagagagtacaagttgccatctggggcatgcgaacacagcctaagctattcttcgctaatttgctcaacaattttcaggaagtttttttagcacgtaccatggatttaatggtttctccttatactacatatgtgtattgtgaagaattattgtgtatgtgtgttacgcccagaaattcactagtaatttccgaactaatttgtgcataaaatcttcgtccaggaatcagccgaggtacacaaactgacaatttaatatacaaatccatcgtaataataacgttacatacttacaaaccaaaagaaaaacagcagcggaataacggtctagcgatggcttcagctccactcacacaggcagctcaactggggtataagccaaacgacttctccttctggatcctttttcttcaactgaggttgattgattattgcaaggtgagcatatgacatactcaacaagccacacagcaaatatgcaagtgtacaaggataccaaaggatggcataacataggctcatttgcaaaagcagccgcaaacacttaagaatagtaaaacagtagagtaatcatcaattttaatcaacactgaacagcacacccatgctgctcaagcccaaccatcctgaacaactaaacctggctacacatatctaattccaaaccaggagctaagcaaattattaccaattatagcatcaaaaattattgtgagaggtgtgagactaatcacgaaaaacattgctcaacccgcccatgactacgggctattcgaatagttttactctggccagagatgtaccactgtacccacaagacacaattccacacatgttaccatgccccgaagtaccaccacggcactgcaaagggaaaaatcgtgacaatacccttcgcacaacacaactcaccacagtgcaccattcctggatcataatcaccccctcaaaaaccagaggcatggactccccagcaacccccacggacttctcgccgcttctcattctggcaccccgtaatgaaccatgctatacaaaaggtaaaatcgttgcccacgctggcttgtggttgacacggttaatgtctcacaacagtagctcgtgaaccggtccttaattgtcatgagcacgaccttcaaaaccatgtgctcacaacccatcattgacaagttttaattatcaattaattatcataacatgattaaccatcgtgagctaccattaaatataaccataaataataatgtagtatatatgattcatcccattaatgagcttatctttctaagcatggctaagcaattacatgtgtagcatttagctgaaccaaaccaatatataaggttctagctaaacaaattataacccatagaaaaataaagtcatcttcggccattaattaattgagaaaggctcaccacccgatgacattcgaaaataatgcataagttgaaataaaacattagctttaaacgggttcaacatgctcaaatggttgtttgggatatgtgtgacttgccttgcaataatcggtcttcaattagtcttcttgaacacttccgacgtactcacgaaccttcgcaacaacggatacgacaagctaacacgcaaaacaaagaaaaagactaataaaaaccaaataaatagtacataaaaagtagacaaacatgtagatcataattttagatgaatttagagacttgaaccacttaattccgacttcatatgaattagttatgaattttagaagattaattccaattacaacctattaaagaaaagactattccaaattaattaaataatttacaaataatttatatctgagataaaagactaaagcatcttccggaaattattgcaatgaatttagtagacgacatatagtaaaaagaactaatatgccattgaaaagggataacaggatttatattgattttgatggccgagatggcgctgatgtcagcgatgacatggctgccacgcgggatcgacacggcgagcacgagaacggtggttaccagcgaaccacggtacaatgatgcaaacggagggcaccgggagagagagaggagatcaaggcgacccttaccaccacttccacgacgacagacggcgagggagatggccggtgacgagctccgcagggcggcgaccttgggttgacgatggcgatggctttccggcgacgagcggcggcaacggaggggtggacgggcttctcctcggtgcttcgaatccaatggaggcgacggcgaccgaaggcgaccatagacgacgacgaacggcgcggctggagatcaaacaggggtggcgaactcggccttcacggtgacagcggcttccggcgggatttggcggaggggaaccagtggacggggtatagctcgaccttgcggagccgagggaggtggcggcgcaggagggcgacggccgaggcgacggcaaacggcggctggagcgactgccggcgacggagagagaagacgagcgtggggaggcggctagggttagggaaaacttcgggaaacagggggaaaccgaagaggaggccgaggggatgctatttatagccggaagagggagatatcgcctcgggaacagatggatttggtgaaggaaattaggatttatctcgagttcacccgaataaaaacggccaaaattcgtgagatagataacgaatttgatggggatttcttgtggataagatagaggagatagagaggaatccttttttgcaatcaatgttggaagggaagcaacaaagcgaccggattcggcggagattggcgccggtatcgggatgaacacggcctctgtccagccggctggaggtaggagaagcactgtagcgagagggagaaggattagactttacgctgggctgaggaacagagagaaggaggaaggaatgggccgaaaagggcccaagctgaggaggaggatttttattactttaacaaataaatcaatcaccaaaatgatctttgaattgttaaaattacttccaatgctcaaataatttcaggaaaaaaatcctgaaactaattggacactcaaagtacttaacaagattataatcagaccatttaaggattaatttattatttaaataattgctgaactgctctttgtatgattaaaattaggaattgagctccaaaaaatccgagaaaattccagagagtataattaaccatggagaatttaataaaaattaaatccatccatgctttatatttaggaaattttatttcccacatttaacttcacttgtaaattaataaacatttaatataaattccaataataatttattaaataatttataaatcctaagacgaaaatcaggatgtgacaatgtgtatgcaggtgcggatctaccatgagatggcggggctcgagcctctactgttagcgctaggatcatgagaagtaccacacgaaggcttcactaaaacttttttgccatacatatatgagaagaggggttatagttttctccagcttgtttagatatccgtgttattttttcatgtatctaccaccgtgtgcatgaatacattttggtgctcctacctagtatatatggccagatcagaccatgcatacaattaataatcatgcatacaattgacttcgatctgatccagcccagcaacggaggtccacgtacatctagacctcctcagctagagggcccaattggtttttagttgggccgagcccaattggtctttagttggaccgggtccaattggcgtttattgaagcttagcgctaggcctaattacacaggattacactgagaagttagctcaaaccatcgaattaacgcaaaccaaattaactagagtactaaactctgttcgtaatcggagtagttagcagcatagaatcatagagacggcgaattgatccggtttcatgggtaattaattagtcccggccggacggcggcgacggcgggttgggcggctgcagcagcggcaggttggggaagttccagccggcggccatccccggcaccggcaccggcagcgtcgggaactgtaccgggatcggcggcagctggaagctcggtagcgtccctgttggatagtactccctccttccctaaatccctaaatgtttgacaccgttgacttttttaaacatgtttggccgttcgttttattcaaaaaaacttttgtgatatgtgtaaaactatatgtatacataaaaatatatttaacaataaatcaaatcaatgatagaaaagaattaataattacttaattttttttataagacgaacggtcaaacattttttaaaaagttaacggcgtcaaacattttgagatggaggtagtgtaagagatgtatactacgtaacgtgggacacattgtattgagcctcgggggccggtatatataggagtacatggagagaagataaggaaggattacagatatggaaggagtccacataaatcaatcatattctaatatgactctaactaccatatactctaaccgtcctcatcccaccaccggccgtcgccgacctcggcatccccagctgcggcgcggccggcggcgatgtcgatccctcggccgctgcagcagcggcggtgtggctcgccgcgacggcgcatgagaggagcagcaacgttgctgctgctgctgccggcgccgtgcccttgcgcgccatctgtgtatatactgaacgtcgtcggtattgtgttgcaagatttggtttgcttggatctctctgatagtctgaacgtattatatagacacacacaccaccacagtttgcagttgcagacaggaagtagtgtcgatggttttggcaggagacttgtgaagtttgtgtgatcatgtgacggatcatatcgatcgacgcatgcatgcatgaatgcaatcaacatagctactaccagtgttccggccggtctcgtggttgtgttgtttgcgtggtctcggttagttgttgttcgttgaggaaagggttgatcagtgcagtaattagtgatcgtgacaccgcaaattaaatacatggcgagaccgccaaattgctatatgaccatttgaaattttactttatttgctaaatgtacaaaggaaactccaaaataatttgtcagtgatatactccctccatcctaaaatgtttgacgccgttgactttttttaaatgtttgaccgcttgtcttattcaaaaaatttaagtaattattaattctttttctatcatttgatttattgttaaatatatttttatatatacatatagttttacacatttcacaaaagtttttgaataagacgaacggtcaaacatgtttaaaaaagtcaacgacatcaaatatttaggaaaggagggagtaccaaaataaactgttttaggctagaattttcaagattaaaatacggaccatccgaagtacgttgggccggcctcttagctgccccgtagatcagcgtagctagctggccgggccagccaagatcagtacaaattaaattaggaacatgtcattgtcctctagtctcaggacaaaaatcacagtataaaaaccaacattttcacccgtaccgttcaaacaatttgtcttcgatttgaagttgccgtagtctaccttgcattcaccaaattaaaactgtcctgttcttcgtcgtcgcgctccctcaccctattggtcgtttcagatcgcgtcatcgcgacgagccattcaatatacagacctgggtggtgttggagcgttcacccgtcactacgttctcttcgatatatactctaagaaaaaaaataatctgtacctctcatgtactagtaatagtatcaattaaataaaagcaaccacctattaaataatgtttgatgctccagctggagcacgatcgatgatctgattgaacggtctagctagaaatccgtgttgtaaaacataacctgtttatattggtttcaagctagtttttccaatccttctatgctacttcctccgtttcataatacaagtcattctagcatttttcacatttatgttgatgttaatgaatctaaatagatatatatgtctatattcttaacatcaatatgaatgtgagaaatattagaatgacttacattatgaaacggagggagtaggaccttgcttgaggaagacatgttactacagtttgcctacagtttgtgctatatatactggcctctatccaggtcaacgtgtctaacctgcaagagagctaatctcctatatggtcttagctaccgggatctataccctgcaactgtcatcagctgggcatgaagaacagcaggcggccagctatatttatttcagcttaattctcaaagggtatatatactttggtgaagatcgatcggtgcatggttgattagagagccaactgaatgggatttcgctcagtttgatcctcatcacagtaggtgcttaattggtgagtggttaattagttaatataagcccctcctgaccttcttttggctctctcttttcgacgctttttatttatttatttttgttcttgatggatgattatttgatctcccacgatctaagattgctgttatttactgtatttgagttctgaccactgctcccacctactcaaatctaatagaggccattgcaaactgcagtgtcccctctaaaatggcccatgatattagaaagcctcttgtaaatagtacaaacaacatgaaacaagcatgagctgatatttgcaattgaattttctatgagatcgatgagaatatgcaaaagcaaacatataggagcatatgtccggtcgtgtaccggccgtatggatatactacctccatcccaaaatatttgacgccgttgactttttaaaaaatgtttgaccgttcgtcttatttaaaaaatttaagtaattgttaattctttttctatcatttaatttattgttaaatatacttttatgtatacatatagttttacacatatcacaaaagtttttgaataaaatgaacggtcaaacatgtttaaaaaagtcaacggtgtcaaacatttagggaaggagggagtatatatgtaaacagaagcatggttcctacatgcatattgatcagagatatatactctctccatcgtcttataaaaaacaaacctattatgagatatacatcataatactacgaatctgaacatgagcagtttgtttttcatgggatgaaggagggagtatgaaaagctggcttgcttaattgtgcaccatgcagatcaagagcagggaatgcaagaaaatgcagcatatggtatgtaaaatgcacgatgctggtgagtaatgttttaatgccccttatttgttactttggttaattaatttctacttaattttatccagttttgcctgatcagtaccctactttaattgtttcactatataatttgcacccggttattactatattgttgtagtgtgtctatcttaccattaataagatactccctccgtccctaaatatttgacgccgttgacttttttaaacatatttgacctttcatcttattcaaaaaatttaagtaattattaattccttttctatcatttgatttattgttaaatatacttttatgtatacatatagttttacatattttataaaagtttttgaataaaacgaacggtcaaatatgttttaaaaagtcaacggcgtcaaacatttagggacggagggagtaagaagtataaggctagtttttgtaacatatatagggtatccactatatatccctctattcctttgcaatagtactgaactgctatgcttatactaggacattaattactttggttacacagttgggaggtgtcagtttagtccagtggctgtagcacaatgttgtcttttgaggtgatttttttcatcaagtttattttgcatgatactccctgatcattaagatttcttagcaacatttatgaaaccacattaaaaaaaggacgtacgcataggcagatatatagcccgtgcttcacttgaagatttgtcattcatgcctcaattttcactagctaacacagaacgtttatgtgtacaataatccatctctcttttatggtttttatgtgtgtgaccacgttcttactagatgcacgaaaattatcattttagagttttacagtttatggaatgcttgtgtgtgtgtgttgcaaatgctcagtttatggatgatctagcaacagctaaaatgatgctacggattaatattattgtttttctatctgaaacaaatagatcatcaggcaatacacacatcaattgaggaacaacagctagcacacaacttatttcatgaccacgttcttaattagtttcttactagatgcatgaaaaccatcattttagagttttacactttatgaaatgcatgacagatttcaatcctagtgatagtagaaaattttcaaataagctagctggtgcaaaatggtttctgcggccgctatgcatgtcattcccattccccagaagttgatattgttaactgttaggtgcaaacgttgcaagcaaagcgcgcatgacacacacagccagagggcttcatgcatgttattaattacgatggaacaaattactccgatcccattttagcgcatgaaaagatggtttttgctaaccagccatcttaaaatggattcatttgcaattgaacagtataaatttacatattaattgtattgttttatgctctacttccttctcacggcgagagtcctgctactatactgctggtcagtcggaccgagccatgatccggaagaccggaagggagtcattcatgatctccctcttaaaacaattaataaggctagcttgaagcttctgatcattaattaacctacgatccgtctagctatactaagctactcttcgctaatctgcttaacaactttcaggaagtttttttcaagtatgtactatggattgaatggctgcttatacatatgtactgtgaagaattaccgtgtatatgtatgcaggggcagatatactttgggggtggcgggggctcaagcctctactgttagtaccaggactatgagagttctacgaaacctccactaaattttttattttgccatacgtatatgagaagagggttatagttttatttaattagtttgttcagattccttgttattttttcatggatctaccaccgtgtttatgaataaattttggtactcctacctattatggccagatcagaccatgcatataattaatcagtaattgttgctgtggattttggatcggatgagtgtgttaaatcggctgtactgtacgttgctgttgttactgctgatacacggaacctgcaaatgagcataggaaaagattgtttgcctatgtatgtatatatgcattttaggcgccaatgtattcggtgttgttaactaatctgtcgacgttttaattatgaatggcagaagtagctagtgtgcctcagctccgttgcctatctggaatgtgagaaggttgttcctaataacaaacgtagcaagatataccgatgcatgaaatgtaaatatttattgaaaaccacaaattaaaaacattcttaggttatatcgtcgactccgttgctgttactttcaccattttattggagaacaacttattatagttaccttggagtctttggaccggtaaaaatacaataggagcgctaatttgccgcgttagtttcctgcaaatatttctttgggcgtatatagatcgatctgatcgagcctttccgttttcctttttggacagtgatctccaatttttctccaatctagcgggctcgatctgggtagtttagttgggccggccagtaaaaacggtgagattctatttggccttttaatggaaaagttcacttttagtccctccagtaatgcctgattcgtaatcctcaggaacaaaacaaaatactccctccatcccaaaatgtttgacgccgttgactttttaaaaaatatttaaccattcgtcttattcaaaaaatttaagtaattattaattcttttcctatcatttgatctattgttaaatatatttttatgtatacatatagttttacatatttctcaaaagtttttgaataagacgaacggttaaatatgtttaataaagtcaacagcgtcaaacatttaatgaaggagggagtataaagacttccttatctatgaaattaccttgcctctctaaccgatttggacaacggtggtttggtcctctctctcatcgttcgatcttatgataaattttctctcctagtcgacgtgttatataggaccaaaccatcaaaaaggtggttcttggaaattttctcataagaacaatgagctagagtctataaagaaacagcttcgagaaacgtccaggagtcctccgactagcaccacatgagtagttggctagccggcctaggttccatcctttctaataaaattcgatgtgagagccatcctctcatacccaacgtttgtcttaataaagaaacagcttcaagacggtgaagcgaggaacaattaggctgagcagcagaatggtgttgtggttgagcgtttatccaacaaagagggatacagatactaatcatctataggttactccctccaaataatttataatttctttgtggcactcatataacatgaagaatactagcgcttacatgacattacaataataaaataaatagtgttaaaaatctatagaacctacatctaatctcttagaggttggacctatatgccagcatcatccatgaggggttccaacacgaaggtgtacgttgggctggcagcgatcgacgatgcagaggcgaaaatatatttataattgtagcactactttgtaacaagtagacaattttcccgtacaattttgcacagggcttgttgacttagatttttttatagacaactattgtctcctatttctatgtatattttttcctatatatacgcattttggagagtatgattgatttgatatatagctcataacttttgttcctatagatatgtacaaatataataataacttttatagtacaacaactattagttaatataaatttgattgcatatcttgatcaaacaatctagattttattcgttttcttcaattattgtgataacatcttctagaagatggatatacgggttttctttaatttcgagctatcatgtacacaaagaagatgggatatattgtaggtgttagggttgtctattggatcacctaggtttagatctagtcgggtggttctatttgtgatggatgattgaacaacaatagagaataagggaaagggtttagggatgtgaccggttgacgcgttggatgaagaggaagtcccggccatcgtcgccgccgccactccaccccataaaccctaaccgatcgagggggcgcagccagtgacgggaagactccaccgccacgccacgacctcgccgggatcccctacgaccaccactgcggcgcagcaccgtcgccgtcacgaccaccatagccgccgccgcccacgtcaagcagagcgacgacaacgacgatggccgggacttcctcttcatccaacgcgtcaaccggtcacatccctaaaccctttcccttattctctattgttgttcaatcatccatcgcaaatagaaccacccgactagatctaaacctaggtgatccaatagacaaccctaacaatggtatcagagctgccctagtgtttagattggttcgggaaagaaatccaaagagaaaagcaaagaaaagcaaacgatccaacggatcgaaaagaaaaaccctaaccctaatcttacctcgtcgccggccgtcgttgacgccggcaacggaggggggaggggcaaagaggcaccgcctaggagcaactcgacggccgtgcgcgcacccgcgggtgcacgcgcgcaccggcgaggaggcccgcggcggcgccgccatctccttcggccgccaccctctttctctcatttcgcggtgggggctagagacagtggggggagaagagaagagaaaagaaaagatggcgccgccgtgtttccccatccaccgccgtcgccggccgtcgccgaagccggggggagacgagagggcgccgaccacaccgttgcaaggccgctcgacggcggcgcgctctgcctagggtgagcacgcgcgccggcgaggggccccgcgacggcgccgccacctcctccagccgccgccgatggcaccgccgctccggtgtagagagaggagggagagaggagaagtgaaatgtgcggctagggttcggccggtcgggaggaaggtttttttgtttccccgaactcggcggctgaccgtccgatcctaaccctagcaaatggatggccggatggtgacggtcggctggtggccgcgggccggacgggccaggccggccaaaagtccactttaggtccctcagccgaaagaaagaaggaaaagaagaaaaagaagtttaataaaagtacctcggccgaaggaagcattttcaatatgtttaatggttgtgtttatttctaagcaatttgaaccaacgtgaaaattgtttagagaatagataaatgtgagaaatgcttctgaacatgtattttgtatattttcatgcaaattacaatagaattttgaattgtttttgcatgttttacctctgtttaaatttgaaccaacgggagaattttacagagagtaagtaacagagttttgttattgtttatacgaattgtatatagatcttccgctgcaaatagatctaaaattaaatttcgaaccaacgggagattttaattttaggaacattaattatgtgctatgatgttgtaatttttctgaccaacgttgataattgcaatgttatagttatggctttatgtgttatgacgcaatcaatatgacgcaacgaaaattcgggaacaaacagatcgaaaatctattttatactcctaattactatttcgcttggaaaatttaaaaatctctaacaataataatctaacacacttttttttgttgtgtttgtatgttagttgcctgcattagatatcttgacaataccactcgcggcgccaaacttttcgagcacatcgtcttcccacaccaccatcgcctccaccatcgccggatcgctcgaagggtagtcgagcagcatcaccgccaacctcgccggagcatcctcctcctcctccggcggcggcggcggcggcagccggaacacccaggcgaccaccgtgtggccggccctgaggccgttggcggcgacgaacctgccgaagctcttgagccggtacaggccattgccgttcttgccgtccacgctgcccaccctgccgaacctcatcgccccgtacctccggccatggcggtcgtagccgtcgagcttcaggccggagctcttcttcttcttcttcttggagaggtcgtcgtcgtcgccgtcgccgccgtggatgagcctcttctcgccgtcggtgaggtcgccgctctcgacgaggccgcgcgcgagctggtacgtcagctgcagccgcgactggttcggcttcgcgtccgacgcgtccacctgcttccggagcttgcacacgaggttccccatgcccagctgctgcagcatgatcaccatctggtctcgcggatcagtcggcggcggcgcaggaacggcggcggcgatggcgtggtcggcgggcggcggcgccgccgcggcgccgttctgggcctcggccatcgctagctccgcacgcttctccaatggtttatatttttttttattttgtttctggtgagattttatagaagggtttagggtaattatctctcggtttaaaatttcttattacagatatggggagataaattctgctgttgttcctgggcgttggatcttgatccaacggcggcggttgttaccgaagatatagaatgtaaacggtggttaaaaactgacagctcgaggtaaaattggcaatagattaattttgcatcacttaaggtatgaagtacgacatttcctgcctacgtactaactgggccacacagcccactgcctgtcgccatcacgttccagcccaactagttgggccgcacgtctgtcacgatcccattccggcccaagacgtacggccctcacgtgcatcatactccctctgtccaaataagttcatttttcacccattccaaacatagcaatacgaaatcaataagactataatatcctcattttattaaatctcaatacgactatttcttactttatctattctcaataaagtcattccttattttcacaaagtccaatacaataattactcataaatgaacttattttgggcaaacgaaagaggctaaaaatgaatttattctagaactgatggtgtagattttagatgcggtgtgtataaaaagctaagttgcgaaattgcgagctgtaaggtgttgtaaccctaaatgtaaaatagttgcaaagtaaccgtaactcgaccgattaggtttcttgtagtaaaactagcccacatgagttttaagatatgggtgctcacatttatgattaattattattttagtgatatgcgacgtatccatcaacagcgagatacccatagtgactttgctaattttaagatatattggtttagtcttttgaatgtgttcataaggataacgtatacgtgtgttcatagggatagcatcgtacgttgtgaacatttacatccgtactgtgtttttaataaaaatgtaaaatagctactggtctactccctccgtcccataatatagcaattgctatattatgggacggagggagtagttttcccagataatcattaccgtgtctacaagggcaacagacaaaatgatttgaagaacaccaatgggatgactgaggtggtgaaagaagcacaaaataagctaggcctacagcgttgaccattgaccaccgagttgacgcacgtgttcgtcaaccattaaatcgactcactgcctaagctaagtcagtcatctcctatatttgttcagtttgcttcagcttgcttcctttagtttaaaatggcaatgtgatcgatcgagctggtggatctcagctcgtgggctttactgccttcgcttcgattcaatttccaatggcaatgtcgacgaccgccatggctggtgatggccatggagtcgaggtcgacgacgtggaggtcggccggagttgcgtcgcggtggcgccgccgccgccgccggccgaagaggaggagaagaaggagggtgctgtggggacgacgtcgtcgacggcatcagcgctcgccgtcgccgccgcggccgccgtcgagctgaccaacctcttcttcttcctccacggcaccggcgacggccgggcagtggcaccgcggcggcgagggcggcggcggtgctgcgagatgggcgtcgctcctgtggagcttgttgaggcggccaccgtgatcttggctctcgccgccttcctttcggccgccggcctcctgctcctccggcacgcggccggtgatcttggtgggcaccaccggatcgtctctccggcgtgcagcacggccgtcctggttgcttccacggcggcgctcttcctcgcgtcgctcggcaccgtcgtcttgctgctgaacgattatcaaactgtcatgtactaatctgttgccgctaaagaaaaaaaattggagggagaaattaacaatgtcaccccaaacatttttttaagcggaaattataatcgtgttagagattgaacacgtgagctcaaagttgataccacacactcaattaccactgccctagtaagtgcatcacatctatcgccgttgtacatgaacaacattacaacaatgatattattaagagtaaatttcacaaaactatatgttttatggttcaagttgcagaaaaccataaatattttgacacttggcatttaagtacatatgtttttttggtaatttcacactatcgatgaatggattcacccgtgagatgacgtggtcgttccatctaagatgaggacgtggcatcctattaatttcgtgcgatggctggtaataggatgacatgtcctcgtcctagatgaaacaatcacgtcatctcgcgggtgaattcattcattgatagtgtggttttgcgaaactacactatcaaaatatatgtacttaagtgccaagtgtcaaagtgtgtggttttctgtaacttggactacaaaacgtgtagttttgtgaaattcactctattattaattaagagagagaaattaacaaattaacgtctctccaaatattttttaagtagaaattatgattgtgttagagattgaacacgtaagctcagggttgataccacacactcaattaccactgcactattaagtgcatctcatgtattgccgctgtacatgagcaacaatgatgttattaatagcctacaaaattcactcacctcggcgttgtcttttttacaagatggatttggtgaaatttgatgggaaagcaaatatgaagaccttgtcgatcggttcgtggccaccaaaggtgaacgaagcatggagtggtgtttgcttgagatggaggtcgcacatttggtggtgaccttaattcgtgcgtgtaggcgtcgatagcgacgacgggaacgacaacagggtgtggagtctgtggcaacgaaatcctcatcggatcggcttcagcgactttggtcatttggtgcgtggtgacaagatctctgatttagagcttagttactctccgatgttatcttccgttttggatcgacgtaagtcgcagatgatggtgtgagcgaaattcaatcggtataatgatctgccgctgattttaatttttaaacatgaagttttctcgtttgagtaagattatgactgcatagaatttataagctgctgatcaggaaaacaatgtttatgtgattctcgctagtatctttgtcttaaggtgaatattctaagtatttttttcttaattaagctatgattttgtaattcacggttatttgaccttttacctatgtgataatttgttatagtttctatgaagtaaaaagtccgaagaaaaaataaatttgatctctagaaaacaaaatggaacctgggcacacgctgcactcaatttcacatttcacctgtcgaacccaacaagagcccacctatccaagggccaaattgcaggccgcagtcacacaaaacaagcccagaacccattttattaaatgccagccaaggaaattggccataattaattcaacctttttgggggagaatgattaactcatccttaatactgtagtggtcactggtcagtcaacatatttttctcagggaaacagtcaacacattgttttctacacgaagggtaggtctcaattgcattagaggaggattttttttttcaaaaaaatgtttacagcaggcaggaagaagggagcagtacagaaaagcgaaaaactcgtgcaaattacactaaaaaagtcgctccctttttaaaatgtccccttaacttgcgatgtattgtggctggaggttttggtctcgaaaagttcaaatgcttatggccatttagttcgcgaaaagaaaatttttcagtgtcacatcagatgtttgatcggatgtcagaagggtttttcggatacgaatgaaaaaaataatttcataactcgtctggaaaccgcgagacaaatcttttgaccctaattaatccgtcattagcacatgaaggttactatagcacttatggctaatcatggactaattaggctcaaaagatttgtctcgcgatttcctccctaactgtgcaattagttttttcatttatctatatttaatgctttatacatgtgtccaaagattcgatgtgatatttttgggaaaaaaatttggagaactaaatagggccttaaacatgtgtaaataactaggcaatttgacctatgctcatttttcatacaaccaaatacgcatacgtaacaacggattatccaaaacagaaaaaaatatttctcccagtcctaattgagaaaagaaatctcaatctggttcgaacaagattctccatcttaaaaaggaaaaaaaaaagacaaactgctgttaaagtggtaagttagtataacggtggtggtattaccatcatcactaaagttaagattttgctgtcaccatgatggtacaaacacaattagcaaagaagcaatatgtgcatcaccgttttaaaaacaagatcctaaaaggtccgacaaaattggttaaaaacgattgcatgtctacatggcccatttaattgtgtaatctctgcaactaacatattgcttttgtgtgttgatgtcgaactaagacctcggcacacattatgttgttgtttgttttgtagtatgcaatttccttgcaaacaaacaacccttttttgttaccatcaagtcaaggggacatcagtagtagtgtaatccatacaatgacgttgcgacaaattaaagagcgagttggaaaaagggaaagctcaggcctcagggtgccgcacttttccaccggaaaaaggttaaaaacgattgcatgtctacatggcccatttttgtgtaatctttgcaactaacatattgcttttgtgtattgatgtcgatagggatgaaactggttcgaatagtttccgtccgtccggaccatttttcggattcggatagtttcggtcggaattatccggaaattctcggattcggaaacgaattcggatattttttctcggaaacgaaaacgaatacagtaagggtattatccgtcagaatcggaaaacggtcggaaactatccggaatttttttcgaatatccgtagacattgagcaaattttagaataaacacgtatatatgcataacttttttatacggaatcagatgaagacaaactttatatcaatattgtagagcttgatgagatctacagctttattattgactattttattatttgaggccatttaagggtctaaatattcattataatataccatattaatttttacaaaatctcagatctacaattcaaaagacatccgatggagatgtgttccatatcaaaattgtagagctcaacgggatctaccactttgtagtttataacatttgtatttaaaagcatttaaagtataatacaaacattacaagtttcgaagatgtgaagtaaaataaataacatctccaatttaaacaatagtaagtaagttatacatctagtaaaaggtcttgggaatagaaaatgataattatatttgcatatggatctgttagaggaacagccatgaaaatcaatttttacatatagttgtgggaccgtctacaaaattgacgatataaatgttggagatgttgaactaaaataataagcgatatctcttcctttatcaaaaaaactcaatttgaggggttttttatataccggtaaatattcgctaccgtattcgttccgtctcgtattcgctccgtatctgtattcgataatatttgatttcatttccgtatccgagtttttgattccgattccgattccgaaaaaaaatatgaaaatgaatataataaagctagtttccgatccgttttcatccctagatgtcgaagacccttggcatacactatatgctgttgtttttgtatgcactatacatatatatatatatatatatatatatatatatatatatatatatatatatatatatatatataggacactcatatggggcaccatggtgcccgggcaccatggtttcaaatgcacaaaatcactcaaatttttcaaaattttctaattgtgagtatatacctagttataagaatttgattcgtacctatacctatcaacaaaacaactcaaatttaactttatttcacaatccatgattacatacctaactaattatatgtatggatgctatatacctagaatcaaaatctaacaaaaataagttcaaattcagttcaaacttgctttgaactagttagtaaaagtagttaatgttaataccctaaataattaaaaaagtttcatactcatttgaattgggtatatactcaatttcaacaatggtgcccgggcaccatggagcaccaaacaaatttactatatatatatatatatatatatatatatatatatatatatatatatatatatatatatatatatagacacacacacatatatacatacatatatatatatatatatacatatatatatacatatatatatatatatacacatatactgtatatccttccaaacaaacaaccttttcttttctgaaaggcaagaaaatggattgtcccctgttgccatcaaggggacatcagtacgcatttagttactaatccatacaatgacatttcgacaagagcgagttggaaaaagggaaagctcaggggggcgcacttttccactggagataacggcgaagtgcgtgtcccggcgtggacttcgccggagtccgccgcccaaggtggcgctggtcggcacggcactgcacgcctcgaaaacgacctacgccttctcgctaattaagctccccggtcaggtcactctatgcttaatcacgaccaggtcactgcaggttggagttggattccggcgccggcgacgaccgtggacggacgacgacgagcagggcacgtcgcatgcatttcacaaggctaattaactagagagattaattaactaagttgtcacagggtaaaaatctgattacgagtactaattaatcagagttaagtactaataccatgtcctaatttacctgacgtacaggttatcactaacttgcaacgacgaagtaagaatggtagaattcacatcaatccagctgggacccgaccaacatggcaccacgtaatagcgacactggtgttgacctccatcccctataaaataatgtgcatgcatggttaattttcctcctcactcactactcaccctgtgctcaaactattcagaccctcatcacttcatctcagcactaggtaaacacttcataattcgtttaattctttcttcaaaagaatccatagatcacattctctcatctgacctatctaaaaaaacctatctaaaaaaacattctctcatctgttcttctgaatcttacttctgttagtctgtaattaatcaagttgttaattgctgcaaaaggtggccggcaggtgtaccactgtacaggatggagcctgcaggtgggcgagtcgtcgtcgccggcggcggcggcggcggcggccggcgaccttccggcgtgctgctgatgctgtacgccgccggcgggatcctcatcctgaactccacggcgccggtgatgaactctcacgtgctggccatcatgggtttctaccacgccatgtggctgctgggatgcgccatcttcttcgcattcctggggtagaagaagaagagagatcgctgggggtgaaatctttctttgaaacgcgcgaattttgagagaatttagttttggaaagattctcacgaaattcggctgtttcaaaggaggccttgactacgtcacgtatactactatagtaatgtttgtttggtttgtttttttgtttttgttttttgcgttaatttgtgcgtgcctgtttccgattttagtttgggaaacaagaagtgtaatcgggttacctgaatttatgttggaaacctgaagattaacggcactactcttgtaataatacgacttgcttattaggagtatcattgatcactactagtagcgttgaatagtcttcttggtaatgtaatttttttttcaccattgccatttttgtaagggtatatgatgatatgtcaaattataaaatgcattggcaacatgtcaaattgggactgcctatatatttgtcgacaaatttttccctaaaaatttgacagatgtaattataggacaatcgtagtgtaattacaatgtaacttctatgtaagtttcacataattttgaatcgttagatctattacaaaatttgtcttggcgaggaaaaaaacaaatcatagcacacacatatatgaaagaatttgttcccacgaccttcattttaccgaaatatcatgttatggagagatttttgaaagttacatacaagttacactatagttacagtgtaattacatgcaagttacagtgtaattacactatgattgtactgtaattacatctgttaaatttttgggggaaaatttgtcgacaaatatatagcaaaatcgtgtcaaatttgtcttgggcatttggacttttgacttcggatgggccgggcccagtctggcccatgtgcagtggcagcctcctcagccacgagatggagaggaggaatcaaaccaaggtgcacgcgcttttctcctcgcaaatccccaattcctcaatcgctcaagccgccgccgcggcgaaccctagcctcgccaccgccgcgaaccctagcgtcgcgttgcctcgccgccgctgcgagccgtcgaaccctaagcctcgcctccgtgtccacccgccggcctcgacgccaccaagaaggtgccgagctcggggggttgtacgttcgccgcgctccggcggaggccgtctgcgtcgtgggggaggtaagcatctctgcctcgatcggcgacagatcctctcatgctcgcgttaagattacgcgtcccgatccgtatattggtcaatctgatgcgtatcggcgatccatatttttctttttttctctcacttcagcagcatattaagtattgataaaacttgatttcctgctttgatatgcaagagcctactccctcggtcccataaaaaaccaacctagcaccggaatatgcaagagcctgctatgacatatcctagtactataaatatgtcctagtactgaaatatactccatccgttaaaaaaaaaccaacctagatgaagataggacaccagctagaacaatcttaggacggagaaagtactaccttattgcttatcttatttcatactatcaccatttggagtgagtgccatttggctgtgttcggattctagtgatgggaactaatctctcccgcacggaaaacggagcagtccattagcgcgtgattaattaagtattagctaatttatttttaaaaatagattaatttgattttttaagcaactttcatatagaaacttttaaaaaaacgcatcgtttagtagtttgaaaaacgtgcgcgcggaaaacgagagagatgggttggaaacatgggatgcaaacggggagtcctaagagcaggtacgataagctgactaggcgggctgcaaaaatataccacgtcatcttattcctatgtggaggaaagagaatagatgagagagaaggaagcgggcgactaatctgtcgccgggcgatacacttttctcgacgcgctaccgctcgattgcagccggccctggcgataaaaacgcggtttgtggggcccgcacaccacagccgatcccgcaacgctccctccgcttccccctcgacgcatatgcggcgcgcgatctctgcctcctcggcgcccgctcgatctccgcttccctccagcgcgccatctctggatgcagtcaggctaccggcgtgggcggccaggtgcagcggcgtgctcccaggccgggaagcggtgggcacggagacgtcgtccttgtcgaacagcaggtgcacgcatgccaggcggccctgcctggagcgctggagctaggtgcagcagcatggcaccccgcgtccctgacgtagacgaagcgagagaagctcctaaggcagcgacggtccggtccctgcctgggataataatattaattatgggttaatctagttagttgctatggtatttgagttatctattagtgcttgtagtttccatactacatagaacttggtttatatggtagtggtagtgtttgatgaataaaattcatgtcacagcgcaaatggctacagggatataattcactcttaatcctacacattgacatgtgcatgttataattaattatttgattataagatgtagtcatccaatgaacaagctattgtatctatagttggctttaggagtatactattagccttgctctaatgggcgatcagtcgcgctctctccacgccgcgcgatcagttctgaccctttagtctctcctctctactagcgttttccgttttttttttcggtttctcttgtgcgcccgagttttccgtttcttttttgtttttttcggtttcattttttttgtttttttctgtttttcttccgtaccttccgttttgttttttttctgtttttttctttccatatcttttcctgtttttaatacttatgtatgcaaactttatatatttttgtatacgtttatttttaggtttttatacgtacgtataccaatttagtatacatgtatacaaagtttgtatacacatataaagtttgtatatgcgtatttttttgggtttttatacccacgtataccaattttgcatacacgtatataaagtttatatacacatttacaaaatttatatacgtgtatttttttaggtttttatacgtaggtacaaatataaactttgtatacgcgtatacaaaccttgcatcccgtacgtacacatatataaactttgtatacacgtatacaaagtttgtatacgtgtatacaaagtttgcatacgcttatactaactttgtatatgtacatattaaaaaccgagagaaaaaacatgaataaaaaagaaaatacaaaacttagtatacatatgaatataaactttgcatacgtacatcttaaaaaaactgaaaaaaaagaagagaaaaaaaagaaaaaaaccaaacagaaagagaaccggaaaaaaagaagagaaaccgaacaaaacccaaaaaaaccagaaacagaaagagaaccggaaaaaaaaggaagagaagcgaaaaaaaccgcgtgggcaccgtccgccgccccctccgcgcgtgacatgtgtccagtcgcgcgcccgcgcgactggtcgcccattagctttttcggatgcaaacacatccaagttgcgatctgtgcacttcgaaggcattccatattagtatcctgttgtaaattaaagtatcagtacatggtttctggatctaggaattttagtaataccataataacgctaagttagtctattaaccagcccagtattaggtcaaatattatcgttatcgttcctttaggaagtcacaagctacgtacattttgtaccattagtaaagtcaggttggtcttcaagtttgcacattctgatcgcagtgtagaccaaacaagtcgcaccgggccctcttatttgcacattcgaattgcagcgtgggccaacaaggtcatgattgaatcccctcgtgggccgtggcccattataggttcacatgcgaacctacacacaaccatgtttcgcccctactcaacccatgaaaacataaacgccaaagtataaaattttgttcaaagaagagggagaataaaggtgcgatttagtcagagaattttgttaatgtatctaagtagtggcatatctcgaatagctataaaattgtaattgggttgttacaaatatatgataatggcacattgtaaaacaggagaatttataatgatatttttttagataatggaattaaaatctaattaatcctcattttcaaagtatatcctgacacgctttaaattcttgggggcttaaaagttaatgaaaatggagaaagtcggtaggctacaggtgtccattattaacatgaataatatgaatatacttcaacggtgtccattattagcctattctgcaacaccccaaaggggaactgatacataataacttcaccaaacgcaaattcctgaaataatggctgtgtttagatcacgataaaattgaaagtttgattgaaattggaacaatgtaacgaaaaggttgaaagtttatgtgtgtaggaaagttttgatgtgatggaaaagttaaaagtttaaagaaatattttgaaactaaacacggcgaataacgagtttgacaaaatttcgcatcaatggatgcgatcgagtaaacaagtcgaacagaaaaacgagagggatgaacaggtggtcactagccggcccactagcaatgtgaacagatggaaatgtccgatacccaccggcggccgatcgagtccttttttctgtacacgtacgtcacccatgtgacattccgatatccaatgttttggtcgtcatctaccaacaaaattaaatcaatttaacaggcaatctctaaacttatacacattttgtatacatttacaccatatgcttatacattttctatatgtagcaaatgctactgtgatagtatagtatcgttcattttacaagctgagatgttcaagctataaactcgacacgaatacacgatggatgtaacacgtctgtatttccactggtatgtgacatatactcctatatccatcgcatgcgtgcttttgtaaagtggatgttgcatgcatacataggctatgttagccagaaagttggtttttatcattggatgaatatatagaagcattggactgaatttgacatatctaagtcccacaaatctagatagaagcatgtttgaatttgtagtattatgatatattaaattcgatcccaagttactatatattgaaatgaaacttactccctctgttccaggttacaatgcattttgacttttatctaaatcaaactgcttcaaatttgatcaaatttatagaaaaaatagtaacattttcaatccaaagacagatttattatgaaaatatattcaattattgagttaataaaactaatttggtattgtaaatgttattatatttatctataaacttagttaaacttaaattttttaccaaagttaagatgatctataaaatgaaacgaagagagtaataacttgtcatggcctcgtgggtgtatcgtttgtgttgtgttcttttaagaaagaaaaaccattcgttctcgttttatggccttggacattgtcagtgacatgggatcgggagtatcatgactagaggtttgaggcagacacaatcgcccacgtggcctggcaccctcgggggacgtcgggcccgagggtgatgtgttcgccctcctcttagtccccccgagggggtcgagccgcacccgcctcggccccgagggccgaggcgccccgacccctcgtgggttttcgctccgcgtgtatgggttaggtgggcacagtggggctcacctaaccacatttattgcggtttggctgagcgtgtcacgccgcatgtaacgcggtgcagtgcactcatttatccggtctgtgaccagtcacagaccggtcagatcgcgggttaggcggcgacaggcgatctgacgcacgcctcgctagcgtgttacctcccagagatggcacgttagtcctggtcagatatatgccaggcttcatcctaaccattacaggcaaaatgttgtgtgaagaagggccaacgtgcagattgctaagctgacgcgtggtggacaagaatgaccgatttgtgaccagtctgacaccggtcatgtcgtcagcagacagccatgattccgcgtcgcgcctgctcccggcgaaagtggaggtaggtgcgggccgtcccatcagaaggtgactcgaacggcaaccatgcaaatctccgtccatttatgaaaaggtagggtaagtccccacagagagggggggatggtgcatgcggtatccccttaagatataaaaggaggaccttgcccactgagagaaagggaggtttttttttttggactggacttttccagattagaaacccagaacaagggagaggctggctcatactttgtagctccttcacacacgaatccaccaaaacacaggagtagggtattacgcttctaagcggcccgaacctgtatacatcgccggcgtcttctgtgcttcctgtctcgcgaaccttccacatacagattgggagcttggagtctcacctagggtccccggccgaaccggcaaaggggggcctgcgcggtctcccggtgaggagccccacgctccgtcagacatgtaaaagaaaaatgataaagttgtgtttagatttagggtgtaaagtttgtaaaggctgtgtttagttcacatcaaaattagaagtttggttgaaattggaatgatgtgacggaaaagttggaagtttacgtgtgtaggaaaattttgatgtgattgaaaagttggaagtttgaaaaaaaaactttagaacatagactaataataaaacaaattatagaatccgcctgtaaactatgagacgaatttattaagcataattaatccatcattagcaaatgttactgtagcaccacattgtcagatcatggagcaattaggcttaaaagatttgtctcacaatttacacacaatctgtgtaattagttattttttcgtttatatttaatattcatacatgtatccaaacattcaatgtgcaagatgaaaatttttgccagggatctgtgacctagatatatgtaaccttgcacacacttccgaatacgttcgaggaagctgcaccatatgaatcaacgcgttattaatacgtaatcagcaagtcttagggcatgtttagatggcaaacaaaaattaccccaacatatcgtatcggatgtacaaacacacatttaaaatattaaacgtagtgtaataataaaattttgcctataaactgcgagacgaatttattaagcctaattaacttgtcattagtaaatgtttacggtagcaccacattttttatcaaataatgacgcaattaggcttaaaagattcgtcttgcaatttactggcgaactatgtaattatttttttctacatttaatacttcatgcatgtatctgaacattcaatgtgacagcgtgaaaaattttatttgggaattaaacatatccttaatcatcagcacttcatcaatataaaagaacaacccagcgtcgactaatccactacacaccacgtgatttcctctcccaaatccaccaaccgtcctccggtctctcctgttcttcgctcgatcctccaatttcctctcccaaatcatctcgagtagtaatcagtgtattttgttgcttatttcgatcgatctcatcccaacctgttcgatcgtcgcctccgccgagttttgctgctcgatcggatcggtcaaagcagcacaccggcccggcaagccatggagctgacgctgctggtgttcgtcctcgtcgcggccttctccttcgtgatcggcacggccgtcaccacggcgccggcgccgccatggccagcggcggccttcgccgcctacctcttctgggtcgtcgcctccgccgccgtcgccctgttcgtccgccgccccgccgcgtgaacacacacaccctcaccaactccggccggccaaactcaactcggatcgagatccagtcagtgattctaacccttcacttcctacctactgctccgtccaaaaaaaaaagaaaaaaaactctaattatgaatctagacacgtatatgtctagattcgtagttagaattggattttttttttttggacggagaggtaaacagctagtagtatctcaatctgctagctctatccgccgcctcgctcgatctcggcgttcgcgcgcaccgcacgccggcctgaatggctccaagggaagggaactcctcttctctctctctctctgaaaatatacttagattataatataattcactttgcaggtttttattttttcgaaccgcttttattttattttattctttaacgaaattgatttcttcggtttcataggcgttcaatcgatagatcgatggatcgatctgccaaatttccccgaggaaatttctgctacctccctaggcacacatacatacatataataataaccatatacatcaaattaatgatgtgttacttacagatgatttatatatattagctcatcgatctctcctgatgcaggcaaagggatccaccacaagcggcgcgcggcagccggccggtcgatcgataaccattatatatattcatttggaatgattactaatgctgcaggtcaatatatatcaagatgctgtgttatatttggtgaatatattgcgagttcttcgtcagggagagacggacaatcaaattgtcgtctcgtcttttcgatcaaagtggaggtgctggtggatcatagttaaattcgcaagtctgcgcattcatgaatgcctgaaaaatcgaaaagaggaaatatttattatcttagaatgttatatgcatgtaaatttggatgttgtgattatctcggcatcttataagagtggataaaaaatatttatatacagtacagtacatgttgcttggctatttgtggatttacgattgcttgtggttagtgtttttttaaatagaaattgttgtattgttttcgagttaattggctattgtggtttttgtaaagaaatggggtacatgtatcttttattcttttttttaagaaagggctgaaggtttgtcacttttgcattaaataggacagaggcacaggtgtcactttagacactaataaagttgctctgtctgtgcgtaattgccttgtgctggttaatagactttttaataaagttgctcagttgatctgagaaaaaaatattgacccagctagcatcagcttacactcacgatcctcatgcaaaatagttaggcggacgtgatggttaaaggctgtgtttagtttagcgcaaagtttggattttggttgaaattaaagatgatgtgactgaaaagttctatgcgtatgatatgttgatgtgatggaaaagaactgaagtttggatttaaactttgtatctaaacacagccaaagttagtcggttcaagcccaaaaagtacgcaataatttttcgcaaacgcaatgataacgcaataatgaaaggttgttgtataaagttggacgaatgaacggatggcaatggtaaatgagaaaattaattaagcagctaaacacaaaacaaatgtctgccttagcccctagccagccattcacacgcggaaggaagagaaccgagcctatccctgtctctatctaacgaggactcttataagctagctttacaaatttgatagtaggatttgtatcgagacgtaactaaatcgctagtaaattctacgaatatgttccaaagtgctgcgtagaaatactcgtactccacgacatgccttttcaaagaagccatatatacatgagatatcgtgaaatacgagtgaaacttactgcagtaaaagaggagtcgtcctcctcctcttcacctagccaatcatgcgtcccaccatccagaaaaaaccaaacagtttctccagaaaaccgtcaattaggaaaaataaccaaaatataggtggatccaaacacggtgtactaataacactgtaaataggttttattttgttatgaaatgatatagcatggataatttactaatatactccattcgtcccaaaataagtgtagttttgcactattcatctctaacgtttgaccgttcgtattatttgaaatttttttatgattactatttttattattattagatgataaaacatgaatagtactttatgtgtgactaattttttaaaaaaattttataaatttttcgaataagacgaacggtcaaacgttagacacgaatttccacggctgcacttattttaggacggatgcagtaagtaaaagaagaatccaatccagcgaagtttgaatgaattaatcggttgagcaacgcgtgggagtagaataaaagtgcagggaaaaaggaaccttactcgtatcctatcagatcaccggtttgccgtatcaacgaagcagagagagcactagaatgttcaccaaatttgtcaaacccaaaagtctagtattggcagaagagcagcaaacaaaagccaattttgcctccgtcgtggaggtccaatctcgatctcatccgcttgtttttgggagacaaacagagagcgaccggccaaatggccaatggtcggtttgagtactggccccacatgcatgccagtgtgtctacagcttagagcaagactaataatacaggcgatttgttagctataagattctttgtagcattctctcagcccacccatatactccctccatctacttttgatagttatattttatcttggcacacagaccagggataagtaattctacttttcattcattaaacatactattagttattcctcgtaaataaacgattcattaatatttacatttatcgatgcccatgtagccaatcttgtgtagaagaatggagagtcacacattaaatcctagaaagtcattaaaatggtaggttgttagattgaaatatgcctatcaaaaataaatttttcagatttagaaatatgactatcaaaagtagatggagggagtaatagctagctctttacaattaatatatgacatacttatctctctcacagagtttcttggttcttgtgtccaagccagctataagtttacatcccgcttctcctctctctcccctcttttctcctccatctcagcatttagtcggcttatagcctactaagatacttgctcttacgcccaactcgcattgctcacttgcattgtcacctgctcaccaaagtcgaagaagttgcctctgaaattaacatgggaaatcatgtcgacatggtgaggttaaagaatggaagagtttattgtacttgattcccttgaacaactcaaggaaaggagaacaattaggactaaccaacctcactagcttacagaaacgtgagcacaaagtcaatcttttaaaaattttagagtcaaatacatagtatacatttttttcgagagtcaaccacagctgttagcaccagtttaaacaacaccttccgagagtttacctaaaacaacaacaaaaaataaaatgaaataaaatagtgctaacattataaaacataacacgaacaattctagcaaaggaattttttttaagcctaggcaagccttatattatcgtcaataggactaggttagattataaggctataatataatcttgaaatgaatgctagcaagttgttattgtcagtggcgaagctatattgttcttgggtgcacatgaacctccaaattcctaatttctcactcaaaaacactagaatgtatagtgttgtactaaaattttctaaatttttaatgatagtacacccccttgttttgatgctagcttcgtctctggttattgtattggcccttgtggccacgtacagcgcaatatgataggtttggcccttgctttgctcgtttgctagccgatcatctaattaattaatctttattagaacctagctagcataattaggcacataattatagtaatactctgtataaagcctaagagtttaggaataagttcaccggaggtccctcaacttaacagcgagattattttaggtccctcaaccacaatactagaaatgttcgtccctaaacttattcaaaccgttcactggaggtcccttggcagtatacgagggtggtttcgctgacgtggcatactagtcagcaaaaaaaaatttaaaaaaatacgtggggcccacatgtcagccactctctcctcttttcctctccttctcttctcttctctctcttctctcttctcttcctcggtgaggggaggccggcggcgagcggcaaaatagcacggcaggcgggcggcgcggagcaggcgggcagatgcgggcgtggcgtccgggacggagcgggcgcagcggcgcgcggggagcacgggagcgacggcgagcgagtgtgggagtagagcagcggcggttgagcgcgacgacgggcgcggggagcacaggagcggagcagcgggcagcgcgtggagtgacggtgggcaagcgtgggagcggaccggcggtggtcgagcgcggcgacgggcgtcgggagcgcgggagcggagcgacagcggcatgcgagagcggcagcggtcggcagatgccaagcggagcggtttgggagggagggggagacggccggcaagcccgtccgagctcgcccagcctgcgcacgagtggaggtgtgccgccggcggacggcatgcgggttcgacgatgaggaaagggggagagatgaatcgacggccgacgacagcgaaggcgggcgtgcgcggcactgggctgctcaccgtcggcgaagacgagacttggagcatgacgagcgccgccgctctcgcccgccgccccgcccgccgctcccaccgtcccggccgcctctctccccctctccgcgtcgcccgccgccctacccgccgctcccaccgtccagaccgcctctctcctttctcccgcttcttccccgcgcgtcgccgcgcccgctccgtcccggatgcctctctccccctttccgcgtcgcccgccgccccacccgccactcccaccgtccagaccgcctctctcctttctcccgcttcttccccgcgcgccgccgcgcccgctccgtcccggacgccgcgcccgcatttcctcgcctgcttcgcgccgcccgcctaccgtgctcttttgccgctcgccgccggcctcccctcaccgaagaagagaagagagaagagagagaagagaagagaaggagaggaaaagaggagagggtggctgacatgtgggccccacgtattttttttaattttttttgctgactaggatgccaagtcagtgaaaccaccatcgtatactgccaagggacctccggtgaatggtttgaatgagtttagggcgaacatttctggtattgtggttgagggacctcaaaaaatctcgctgttaagttgagggacctctggtgaacttattccaagagtttaatgcatgcatggagcccagtcactagctcaaggtggtcggcctcaacatggccgaatgggttgcctggctcagctcggcctgggcacagccaaggcccaaccccgccaaacggttgggccagactgtgcccaggcactgcccaatacgaggtgggccgactcgaaggcacgaccagcctcttgtgctcattcttggaaattggaataagtcttttttgccttcctcctgtttgggccgtgtcttacatatggcagaataagttcacttcacgtcccattataccgctagttgacaccatgcataccactttgctaggttttgtacttacattacttgacaccatatgctagtgtattattcctctatctgcatagtcaaaatctcttctattacaaggcagaggaagcaaattacatgttctgttttgtgtctcagtttgttgagtttgtgatttgaattttagagtatgtactgtatttggattagtttcctagattttttttatatatctagacatatcttaactctagatgttatatttgtagtggacttgtggagcagtctaaacctaactccacttatctagggttgtgttcagatccaaagtttggatccaaactccagtcattttccattacatcaacctatcatacacacacaacttttcagtcacatcatctccaatttcaaccaaaatctaaactttgaatccaactaaacacagcctagatcatataattcattcgcagctaaatggaccaacaagcaatagctacacctaattaattactcgtagtacactacccagccaggcagccagccccaaacatgtgtgacacatattacgtgatagagggatagagacagaatgggcaagatgaattcatataaaagataatataaaagaagtcttaagtgttccatctttgtgatagaaacaattgatcattcttactgccgtgctaattttgttttaaaatatcgtttgtcaacactactccatgcattgcgcaaataccaaaaaaacatttttactttcagtgacattttcagtttatatagattcttactaaaattaaaaatatcagtgtgtatcatagctggtcacgtgcactaataatttttcatcttcttcggaaaagtcttaggtgctctttgagatagattcaaataaaaatgaagtcaagatgtgtaaaaaaaatattagcacataattgattaagttttttattattataaatttaaaatttagatttccttaatgtaattttgatatagaaagttctttaaggaatacactatttagtatgtttaaaaagcatgctaatataaaccaaacaagactctacagcactgcaaatacgcatcttaatataggaaataatataggaaatccaaatcctacatcgacgacttgccgctgatcgatactgggagtagaaaaaaagtttcgagccggaagcaacgacaaaacagcggtcagacagacgcacaatccccaaggtgtctgatctgatctcaagttctgaattctgatcaagtggcgaagagaaaagtctgtagtagtctgatctgcttgcattgcagggcagggtagcatgggtacgtcctgtcaccctgaaatctttgtatgcatgcaatgctgcgatgagctgatcagattgtctttgctgctgctgctgctgctcttctcctctgcctgcagcttcgccatgccattgtcccatcacctcatgtaccactgctcctactgccgcatgctcacgtgtgcctgatttcctttccttgcatctcgatctgcatttgcatgcacacgaatactactactcacacgtgtgcaccaaaacccccgtccactccagcacacagatttgcattgtcactgaattggccaacaggtgattgtgtgcgtttttagctgctccctctgtcccataatataagggagtttaagtttttacttgcaacgtttgaccactcgtcttatttaaatttttttgaaattattaattattttatttgtgacttaatttattatctacagtactttaaacacaactttttattttttatatttgcagaaaaaatttgaataaaacgagtggtcaaacgttgtaagcaaaaactgaaaatcccttatattgtgggacggagggagtagtacttaaaaacctaatattaaaaaaaaacaatgttaaaaatatcttaaagttaactctaaaattaaattcaaaatttacccgtgactgattctttttttccccaaaaaatgaatcttccttattcaataaggcccactatgatttgtataggagaaatatagaaaattgggaggattttaataatataaaaaatccctaggaaggcatgaaacaaaggattgtatcctattattttgtttgaaatttctatgcaattggcaatcttatatatattttggagaaaagttagtaaaagctcaaatctcttggaaaaaaaattccgacactatctctctcatccaattttgatgtttttcatgcggcctaatgaaacgattagtcctatttttatccaatgctttacagtcatttattttgcacttactattcttgttaaaataatatgtttttattattcctctcttttttcaattttgtaaaactagccctgatttactttacagtgtattatggcttgctaggctggaaaatgtattaccactactattttaccaaacgatcgaatttagagtctgtacgtagcagggatacagtgatgtcatttcaaagtactcttgtatgcataatcagatcgattctactgtagggtcatatctagaacaaactaacaggtgatcaataccatctcaccagaagtttgcctgcttgtttttcgtccctcacacatgttcagatgttctcccttggcctataaagagaaaagattatacggagtatattttttagagatattaaggatataaatggagaatacttttatatacttctactcaatggttagagagtggacgggtgattgatagaacaagtagtgcttataaaatcccttatatttattgataggtgctcctttaaaacgtggggttgagaaggaattaatataagaaacacaggatttgatcagaaaacaagcgtaaaacagattattgcaaacatagaaaaaaacgtagctaacgtctattttaataaaccgtagaaaaaagtatgaattgaaccagacggatagacttgagccattatttagtcatcttttctagatttgaaaagctccgatcctttatttcaaaaggccaaataggaaaagtttatgtgtgatttgaatcttaccaattaaattctttcacaaatcctctatttcaaagggcctaaatgttgctcgtaatatagctattctatgaatatccagcccctccaaacaatttaaattcttaccctaaattttgtgactagtggttacagaattcagaaccgtcccaaaataattttagttttcacctatgtcacagctaccaatagaattatagaaaggccaaaagagtactagaatacccttgacatactagtatatgtcattgttctccactttatctaatcctaatacatttacctgctattttgacaagctccaataaaatgattgcttattgaaagataaaattatttagggacaaataagattgtgaaaattgaaattattagctatcttttttattagttgaactactctctcgttttttataagcccgctttctgaactgctaaacaacatgcttcatataaaaactttctatgtatagaagtttcttcaaaagggtcacatgaatatgttttcaagcttataatagttaagactcgattaattacacgctaatgatccgttgggtttcacgtgccaaaatcagctcaaccgcaaccccacaatcgaacccatccttaaactatttagagaattactggtgcagatttatctacttgattatatgataaatttaatattttataaaattaaacttaacaaatacagtactactccgagtaacttggtgcagcacttctaccgtacaaatggtctactacgagtactcctaactcttaagggagttagtaataaagattttttttttccaaaaatataccactcaatccgtttcatattataagtcatttaatttcctcttagtcaaacttttataggttttactaaatttataaaaaaaaagaaagatctataacaccaaatttgtttaattaaattttaacattgcatacattttggcttgtttcgcattgaaaatattagtatatttttctacaaattcgatcaaggccgtgtttagttgttttggcaaaaaaaaaaaagaaattgatgtatacggacacacatttgaagtattaaacgtagactaataacaaaataaattacatattccgcatgtaaacagcgatacgaatctattaagcctaattaatccttcattagcaatgtttactatagcaccgcattatcaaatcatggcgtaattaggctcaaaagattcgtcaagcatttgacatgcaaactgtgtaattggtttttttcgtccacatttaatgctctttacatgtgtccaaacatttgatgtgacggaaaagttggaagtttaaaaaaaactaaacacagtccacaaatacagataagtctgattaagaaaaaaatcaaaatgagttataaagggaggattatttaaagcacataatttaaaccgacagacatattgctgtaaaagcgcgtggtggtacacggtacacacacctcacatcagccatcgctacacagcagcatactccctccgtccaaaaaaaaaaaaaagacaaaccttgtgtttccgtgccaatgtttaactgtctgtcttatatgaaatttttttataattagtattttcattgtcgttagatgataaaacatgattaatactttatgcgtgacttatctttttaattttttttcataattttttcaaataagacggacggtcgaacgttggacacggaaatcagggtttgtttttttggacggaggaagtaggccgtttttttaacaaattgatccttttcaaaaacttatttcgaaactagtccctgcaaaaaactttaaccaaaaataggccacggactcagcgtcatggacattggcgctaagctataacatatcagcgccaacgtcgttggcgctaaactctaatccgaggtggcatgaattcgctgagtcatcagatcttagcgccaagttatttggcgctgaggtttagacgatttaaataaatgcggaggcatttctagcaacaccccattgatagcataatagtagtagagttctactctatccttaaagagcagggttcaactcccatctctcctttttttttctttccttttagtttccctttttcttctctccctcactcattattaatattttttttctttttttatctcgttttctttttcttttttttccttttagttttccctttttcttctctccctcactctttccttttagtttccctttttcttctctccctccctcattattaatatttttttctttttttatctcgttttctttttcttttttttcctttgagttttccttttttcttctctccctcactctttattaatacgttttttctttttttatctcgttttctttttctatgtttatttatttattttctttttttcttgtaatactatcttcaaaatatatgtttaatatgcaactttctttgaatttgaaaaaaatattaaagtgctatattatatagcaaatgagaatttaaactgaaatttcaaagaaaattcaaaatatttttcttctctccctcactctttattaatattttttccttttttttatctcgttttctttttcttttttttccttttagttttccctttttcttctctccctcactctttattaatatgtttttctaatccaaaataattttcttctctccctcactctttattgtttttttccttttttatctcgttttctttttctttttttttccttttagttttccctttttcttctctccctcactctttattaatatgttttttttctttttttatctcgttttctttttctatctttatttatttattttctttttttgtcttgtaatactatcttcaaaatatatgtttaatatgcaattttttttaaatttgaaaaaaatattaaagtgctatattatatggcaaatgagaactttaactgaaatttcaaatcaaattcaaaataaaacaaatttacaaacgaaacagtcattttgtaaagaataagagtgagtagtgaagagaacaaaacttatttcttttagttttccctttttcttctctccctcactctttattaatatgttttttctttttttatcttgttttctttttctatctttatttatttattttcttttttttgtcttgtaatactatcttcaaaatatatgtttaatatggaactttttttaatttaaaaaaatattaaagtgctatattatatggcaaatgagaacttaaactgaaatttcaaatcaaattcaaaataaaacaaatttacaaacggaacagtcattttgtaaagagagtgagtagtgaagagaacaaaacttatttcttttagttttccctttttcttctctccctcactctttattaatatgttttttctttttttatcttgttttctttttctatctttatttatttattttcttttttttgtcttgtaatactatcttcaaaatatatgtttaatatggaactttttttaatttaaaaaaatattaaagtgctatattatatggcaaatgagaacttaaactgaaatttcaaatcaaattcaaaataaaacaaatttacaaacggaacagtcattttgtaaagagagtgagtagtgaagagaacaaaacttattttgaaaaatacatgaggaaaaccaggattcgatcctagtaccctatggatgacaacccaagcatccaaccaccatgctatcacggtgttggttctatatgttgcttgcgcggctatttaaatcgtctggacctcagcgccaaatagcttgacgctgagatctgatgactcagcgaattcatatcacctcggattatagtttagcgctaatgtttatggcgctgagtccatggcctatttttagttaaagttttttttgcagagactagtttcaaaataaatttttaaaaaggaccaatttataaaaaaacgggggagtaggagtgtaggcaacccgagacgtacaatgcgatgacctctcgagtcgagccttgagacaaatatggatcgatcgatcggagtcgcaccaccatccacgcacacacacacgaagtagtaggagtactcctgcaagcgttctgtgacctttgttctcttgtgagaaaaatcccaaatgatccgtccatgatcatccattgttgagctgaggtgacatctccatacctcccccactccccctcctccacattcaatgcgcgccagcttcctctcgtcgtcgtcgtcgttgagagagcagccagcaatggcgattcagagagagaaaggacagcagctgagagagagtgaggtgactagtgaggtgacaacctttttgcgtatagtaatgtggaaagccttgacgatatctgcgccactgggtccctcaccttgtctccccccttctcctccctctgacggaaagtcagagggacgttgtctaggacccataaaaattgagcccataacctacgtccctctgactttatgttagaggagcgcgatcctccttcaggatgaatctcctctgacgtagaactagagggactttgttactgacatgtaagacctacaaagattagacccacccacgtccctatgacttttggtcagaggagcgcgatccctccctccatatcttctcttctcttctcctctcccttctcttcttcatcgtcttcctcctcattcctcccttctgctggctcctgtatcttcttcttcttggcttcttggtaagctctctcgatcgatctgccacttgatttgtctgtagatcagccagcttgcctgcctgcaccctgcaacgattgatgatcttgtgtattgttgctgcttaattgctgggggattagctagtttagttgctactagagtgtgtttcttgtgttgatctgagtttgatttgattttcagttttgcaccatgcgatcgatcgagagtgtgttgttgttcttgttttggttcttttctagtagtatcagttgcactgattaattaattaatatagcttgtgttttgattcggtagacacggctatctgcagcgtatcaaagcttttcctgttgcacaccacacctaccatgagttcctttcaatcaatgcctaactctctctctctctcgatctgcagatcaaatatacaattcgccttctcgatcgagtagttgatgaacagtgttccccttgattgattgatcaccattattataacatcctctttctttcttctcactgtaccacacacttcgatctctgcagcctgaaccaagcaagaattatagtattagaacaactccagatatctctaaagctgatgatctagctctactttctgcatcgatcgatctcgttaattagggttagatcaccggccggcacagtgcatcttcaaataagcatcatttgctctttgagtgatacagtactatgcttccccttctgctgatctgctctctctgtccctgcatgtattacagttaatttgtgtcagttcttgcttggctgagctaagttcacgccagatcttcaaaaccccaatcttgctactgtgttttgtttttcttggaccacccagttatctgcctttttttatttttttccaaaactcacaaagctttgcacgtcaaacatattagaagaagcattgagataacttccagattagctgaaaccctagttctttctcattctgaatcatccacagtatgtcaaattctcaatagcattagctgcttggtttgaccattggtcatggggttgacgaactgacacgcagcaattaatggttcatgtttggcaggtgagagattgaggagatggacatgatcggcatggcgtcgccggcggaaagccccggcggcggcggcacggccaggccgagcaggtacgagtcgcagaagcggcgggactggcagacgttcgggcagtatctgcgcaaccaccggccgccgctggagctctcccggtgcagcggcgcgcacgtgctggagttcctccggtacctggaccagttcgggaagacgaaggtgcacgcccatggctgccccttcttcggccacccctcgccgccggcgccgtgcccctgcccgctccgccaggcgtggggcagcctcgacgccctcgtcggccgcctccgcgccgccttcgaggagcacggcggccgccctgagtccaaccccttcggcgcccgcgccgtccgcctctacctccgcgacatccgcgacacgcagtccaaggcccgcggcatcgcctacgagaagaagcgccgcaagcgcgccgccgcctcccacaccaagcagaagcagcagcagcagcagctggtggaacaggcggtggcgccgcccgccgccgccgccgccgccgcggcgctgccggacatggagacgacgacgacgacgaccacggtgccgcacttcttgttcccggcgcacttcctccacggccactacttcctggcaccggccggcgagcagcccggcggcggcgacgtcgcggcgtcgacgggcggcgctgccggtgctcccagcggcggcggcggggaggacctggtgctggccatggcggcggcggcggcggccgccgaggcgcacgccgccggctgcatgatgccactgtcggtgttcaactagctcctccatcgatctccattaatccttaagcttacgcagcttttgcaaatgcattatggcgatgggccagcctcatcgccatttgatcatatcaaattgctcgcaaatgcaaatttgcatggatgcgtggtgatttgcatttgctttgggattaattcggaggttttatatataattagctagtgcatgcacacgcacgtaatttgcatggtttttttttgtacgaaatgtttgtagtaaaattttaggttaatttagttataaactgtcactaagctagcggcaagatggtcagctgttggggcgcatgttaattatcttcatggctttgaagtgacttttaattaattaaggactggtcaacgaaatgccaatgtaaattaatcaattaaatcttatatatccagcgttgatcccacacgtacaagtttgtatgtattgtatgcattccaagaactgcaatttcgtaacttttactagttgtcttcaacttaaattgatgggtgttgcatcattaataaccttactcatttttttccgttacacaattttactctatcttttccctcaacacaattgatatttaaatttagacctattatactttcttccaaacattataaataccaaaaattatcccatgttactcatttattttaaaattctctatatggtgacaagttcttgggaacagagaagtactgctgtatacctccgtcactgtctcaaaatataatgatttggcttgcataatttactactagctcaaccaatcacgcaacaatcaatccttcatttaatttcataaattttcttaattaggatgtgatcgttgcaaacagatagagagaagaaatctctcgttcttcacgtgcaagcttcacaagctactaaacaatgtttttttaaaaaaaatctataagaaaatcactttaaaaattatataaatcaaaatttactcaattttcttgtttcttctcatatcaaacatatccataattaattaccatgaaaaacattagtagtgcatgtattttacttatcccatccaagtgagcttcattttcagtactctctccgtactaaaataagtgcagttttatactattcacaattttatactattcacgttcaacgtttgactgttcgtcttatttgaaaaaaaaattatgattagtatttttattgctattagatgataaaacatgaatagtactttatatgtgattaaatatttttaaatttttcataaatttttttaataagacgaatggtcaaatgttgggcactgatatccacggctgcatttattttaggaggaaggtagtacttgccactgcatgcattgacctccagcaccaaagcagctgtactggtagctagctagagcttggtcataaaagcaggagaaatccaggaaagattaggcaaagtacagaccacctaaagtcaagcatttctcactatgcctccatcgagcaatcagatcaacgactgatggatcagcatagagcaccttgatgagatgagatgagaaagagaagtttgatcgagactagaccgacgatggacgttgtgtggtgtgcgtgtgtacagtgtacacagcgcgtgatgtttgaagatgaagattattgtggtaataactgtgattaattgagttttaattattataaaaaaaagattaatcttatatttaaaacaacttttatatagaaaacaactttcatataaaaaaattttcacactctgtttagcaattagaaaaacgtgtcactcttatctaaaagtttattcagtttttattggagaaaaaacagcaccagcattgcgacgaccattcctgtcgttactgacgaaactgaagatgaaaagaatggggttagtcaatcgatcgatcgatcgatagacatggcttgttgaaaggttgcccatagaccatagaccatgggagtgagtagcctctgtgtggccggtgatggaacagccattgatcagccatgggagtcagtgtgtgtgtgtctgttgatctcatgtgcaacagtactttgctccttttgcttttgtgccgatggacttgcacaacgcatagtgaagtgtaccctttgttattgttgtgcacagtcaatgggatttgcatttgaatgggtggtggatttgggcgattgattgattgaggccctgtttagtttcgcacttttagcgtgtcacatagatatacatatactcctatatatttaaagtattaaacgtggactaataataaaataaattacagattctgcctataaattgcgagacgaatttattaagtctaattaatcagccattaacaaatatttattgtagcgccactacaattaggtttaaaagatccgtctcacaatttacacgcaatctgtgtaattaggtttttttatatttaatactctatgtatgtgtttaaacattcgatgtatgcatgtgtttaaacattcgatgtgacatggtgaaaagtttttgtttgggaactaaacggtgcctgaatgaatatatacaacctttaccattcatggtcaggtgattcgaatttgaggaatttttagtcatctagccctggccatggtggtttatatggcagggtgagggcatctcgccaccgctcgacttcaggaggataaggaggggcgtgacgtggatacaacgcgtggaccatgggaccatggaagtcgggaagacgtacgatgacacgatggtagatttagggacgaggaagtggaggtgagggtgtggctggccggttgatcacgccggtgctagtgagttagagggtgactgttgacgactaaatttggtaaatcatgcattattcgaagctaaagtcgaagtgtcacatcaacagtgatgacacgctaggttggaaatgcgagatggaggggcaaagatggcaatagctcaggcgttggaaatgagggagagagtgatggtagggttatataactttgcacgaatcttggagcaatcaaatttataaagatgattgatattagaaaaaaaatgggttaatagctttgtttggtttactgcctttcaaaatgctagcaatgccaaaatctcgacaagtttaatttggtagtgccttttatttggacaacttatgtattatgttaatattattttagtaacaagccgaacactatcaaagtactttttttttacgactcacaacaaacaatgcgaagttcatattgatagagcatgaaaaaaattacaagactccaagggtgggaggtcataaccagaaaacaaagaaaaaataaccacctcccacgcaccgacccaagaaaaggctagcaccaaaccagctgccgctaagcgtgactagtcaccgctaggcacacaaatgaaatacaaccgagatggcccaaaacctaacccttgcacctgataccaaactctactctagccatatctttggaattgagagagcaagggaatgaaaaggaaaaaaagaattgtctcgagacgagcctggattggtcgttctagcacgtactttgtccgtcctaaaaagactcgtttttaagtttgaatctaaacctacgctatgttcaaatttaaattctgaagttagtttatttttttggatagagaaggtatattggtgttggatgtgcactcgaccatacatgtatgccaaaatgcatttggatcaggtgtatactgcttgttgtgcgtgcatggccgtacgcgtagacacacagtaggtagcagagagtggtcctaattataaattgaaacaacagatcgatccaactgaggtttatctagctagccagatcgtagtggtcctgtgtataccagcgtagtacatcgcgtattgattggaacaacgcacgtacgcacgcacgcacgcacatattttggggcaggcgtacagtggcaacgaatgtgaaggggttagtactagtggcttaagtactgctacgctagctgtccatgcgcaagggtcatgttaaattaagctgtcaaataattatgtttcgacgatcgatgttctgtcatgaaaattaacagtactaatatgtaatatctccgtcccaaaataagtacagtcataaatatctgtgtttagcgctttgaccatctgtcttatttaaaaagtttataaaaaatatttaaaaaattagtcacacataaagtattattcatgttttatcatctaataacaataaaaatactaatcataatctttattcaaataagacgaacggtcaaacgttgaacataaatagtgctaaaactacacttattttgggacggagggagtatggttttggatcagataattcagagttagaaaatagacgtagagtatgtgttagccatattgagttgtgatccaaattcatttacacttaataaaagccaacttctaccgtagtggagcggaggcccgtcgtcggtaggcttaggccggagcgtagcggatcgtcatctcttttagggttcccccatatatatatatgggactccatggtgcccgggctccaaggtataaaacacacaaattctctcaaatttttaaaaattttcaaattgtgagtatatacctaggtatatgaatttgattcatacatatacctaacaacaaaacaactcaaactcaactttatttcacaattcattattacatacctaacgaattatatgtttaattgttatatacttagaaccaaaatctaacaaaaaaaagttcaaactcagttcaaacttgttagtaaagaagttaatgttcatatctaaacatttaaaaaaaatttatactcattcaaattgggtatatactcaatttgaatcttggagcccatactccatgtagcaccagttaatatatatatatatatatatatatatacacacacacctcttgtaagccgatatgcggcgttgtaacctcaccccgatatagtgaagatattttgctgactggcgcccgtggtttttctcttctgttttaggagggttttccagttaaatctcgtgtcttctgtgattgatttattgttctttatagtttgtttgactatcatttcctaacaagccacagggacactaatatgttagaatataaaatgaattgtccatcattttatatcagtttaggcttttgtatttgaattgaccagtgcatataatttaatacaggaaaaagatgaattaccccctaaactgttgcggtcgaccgaattaccccctgaacccaaaaaccaaacattgctcaccttaaactttcaataccagacgaattaccccctcgacccaatccagaatggttttgttcttcatggcgtacgcgggcaatccagtcagcattttcttttttaagaaaattatgggacccacctatcatacatccccttcctctcttcctctccctcttcactgactcactctctctcacggagagaccgccgcctccgtgtcaccgctgcctccgcgtcccgcgccgccgcttgctgccgcccatcgcccgcatgctgccgcgcaagagagagagaggaagagtgacagagagagaggaggggaaataggaggtgagcgagagtgacaggtgggcccaccatttaaaaaagtaaatgctgattagattgccacgcatacaccatgtaggataaaaccgctctggattggatcgagggaggtaatttgtccggcattgaaagttcaggatgaacgatgtctggttttttagtttagggggggtaattcggtcaactgtgatagttcgggggtaattcgtactttttccttcaatatatggtatcagagccagaagttttagagtttaaattatgtttggtgcatctcgttaacttaatcttttggttgatcggtgcatgcaactcaatactttcgtaaccttacctaacccttttatatttttagtataacaggtagagtaaatttcacaagactacggccctctttgtttaggcttaagcttattggcctagacttttaagtcatcttattggcttctatgatttataagccagtggatttaatgtcctaagtttagtggttgagccatacatctacctcacataagccaaaaaaagcttctccaacctagcttttggcttaatagtgttagagtggcttatggcttcaaaaaagacaaacggaaaagctgcttgtttatttaggcttagactttttgacttataagttggcttataagtctaaacaaagagggcctacaagtactttgattaagttatctcaaaactacagatttaagatgatttatcacaaattacatatttagtactgaatttgtcacataagtacaaataagcatcgtatcaccgaactacaagtctaatgttaaattagtcacaaaattaggatgtttataaatcaaacataacattagtactacatattcaaacattaaaatatatagttttaggataattttgtgattaaatctatagttttacggtacttagtttgaagcatgtagttttgtgataaatttattattaaatctacagttttgtggtacatcactttaaggtggtgtttgaatctcctgaagataaagataaatattaagtgtttcacgcaaaaacgaggtggtaataacgtgtgattaattgagttttaattattataaacttaaaaaatggattaatatgatattttagaacaactttcacataaaacgtttttgcacaaaacatatcgtttagcagtttaaaaaacgtgccacgaaaatccaaaatttaatcacatgaccaaaataagtatttatgtaatttagtacctatagttttaccaaaattactctaaaaagtactcctacccgctctattttagaattagccttcaatttttttaggctatcttaaaagttaggcttattgttcactcctaccaccattccattagagaaggtacaatagcagactataagtcagatataaacatattttaaggagataaaagagaagagagaagagcagcatggtacatatatgtagccagctgtagcacggacttcaaaaaatagtgtgtgtatgataggtaggaccaggtattaatagagtatgtaacattggccttgtttagttccaaacttttcttcaaacttcaaacttttccatcacatcaaaattttcctacacacattatgaccctgtttagatgggactagaacttttaagtccctatcgtatcggatgtttggacactaattataaatattaaatgtagactattaataaaacatatccataattttggattaattcgcgagacgaatctattgagcctaattaatccatgattagcctatgtgatgctacagtaaacattctctaattatggattaattaggctttaaaaaattgtctcgcaaattagctttcatttatgtaattagttctgtaagtagtctatatttaatactttaaattagtgtttaaatacatagactaaagttaagtccttggatccaaacaccacctaaactttcaacttttccatcacatcgttccaattttaaccaaactttcaattttcgcgtgaactaaacacacccattgtatgaattggctattaagttgactataggtgatttgaagttattagggcagtaggtactcctactctgcaattactattaaaaaatctggaagaagaagaataaaagaaaaatgttggcctagaaatggataccaatggcggtagctagcctaggcgtatattatactctactctaccatgaccccttcttcgctccatactctacaagtgtagagtactcctgaaatggagtaacgaagaccgacgaagatcaaacaaaaacgatcaaagcagaggagcatagacatcaatgccaatcgtcaaaatgcaggcaagagctagcagtgttggtcgtggcaacaacagtactaaaaattttctccgacagatcgagcaggacggacgccacgatggcccggatttgacgtgactctgatttgatctgtgatatgatgtgatgtgtgatgtgatgtgatatgacccgtcggggccctcgtcctcctacagaacctgaatcaaacgtcgcacccttttccaccgccgtcgcctatcgccgcaacatttagattttaagttaaaattaaagatggtgtgattgaaaagttatgtccgtatgacaggttgatgtgatagaaaaggactgaagtttggatctaaactttaaatctaaacacagccctattttaacgaggagtaactcaggagaggatgtttggttggcagttggcacgctcaatttgtctcatcttttagactacctccgtattaaaaaaatataagttaatttttcactccagtcttccggttagcctaatgaaacgtccaaaggtcttctggctagctccacaaggtggtgggctagatgacacgatggccgatctagacgacttgaatcaaatgtgggctagatgacctgaatcaaacgtcctgctcgatctatcgcctattagaggtagctccgcagggtggtgggctagatgacatggattcgaagtctcacaccttctaaatatttgatattagttcattccctaatattcacgtcttttttacccatttcacacatacagataaaaaaaattaaaatgtccttactatatcaaatctcaacgcaattatttctcactttatctactaccaatataataactactccctccgtctcataatataagggattttgagtttttgcttgtaacgtttgaccactcgtctttttcaaaaaaatttaaaattattatttattttatgtgtgacttactttattatctacagtattttaagcataactttttgttttttatatttgtaaaaaaaatttgaataagacgagtggtcaaacattgcaagtaaaaactcaaaatcccttatattatgggacggagggagtattatatactttcacaaattatgatgaaatgattactctataaataaacttattttgggaccaaggaaagatgctgaaaataaacttaatatgggacgaaggaggtggtagagatatcgatcaccacaatttttatctataccatccacttaaaaagtttagagttaacactctattacactagccccaatacacttgtcatcaatctacttcttttttttatctcgcactttttgaagtttgtataaagattgtccctttacgaaggtgggcttatcctctctcttttcttctctcccacaaatcatccttttagcctagtttgtttcttgtctaaattcgtattattagaatgtgactcgtctcattctagatttgtttctcttagagtggaggatggagtattttagattgccttatatttagtattttagatttgtttctcttatatagcgacctagtaccgtggtgaacatgaagagatgtttgattcgttttgttcgaggacgtagtactttaaggcaacatttgttaggaggacaaaataggacaaaatgagaacaaatctctctattttttcctggcacgctttctagtttcttaaattatgttttgatacagtgactttgtaaattttaagatatgtcggtctaaattttttttggaggttttcatagcaacaacgtgatgttcacaagaatgagcgtcaactcgttacgagtcgcatactatgttttaactgtattttttaattaaaaaaaatcgatgaagagcttgatcagcgctccagctgtgtgttgattggtgacgtgtcgttttctaacactgcgtgcgccatcccatcgctccccgcgtttcccggatcttggacgacacgccccacggcccactacctcccgtttcatcttgggctgggccccatttcgtcagtgctttgtgcatgccattgcaattgcaatgcacccagccaagcagaatggagtgccaccatgtgccacgtaccatgtcggttgccgggtggtatacatgggatttgggtgttcaattgaatatctaaaatctcttatattattgaacgaaggtggtatatatgtatactacttcctctgttttataatataggacgtacacacattttaagattagactttagaaacatttgaccaacaattactgtaatataaattaaattttatttgctaaaattaatatcattggactgatatttaaatttattataaggtggttataattttattgtaataaaccttatagtatgagaaattataagtcaaagattagttctataaaaactgtaccaagttttaccatgtcttatattataggatggagggtatatactactagcacaatatattcgtctactgatggtagtcgtagagatggcaatgaccccattttgggtcaccaaaaataagaaaacatacttttatcatcactgtcatcgtattataaatcggtacttccaacttctcataaaaacactagtagtatcaaatttcagaaatgttgcagattttgaatgtgaatgttggatcgcggaggctgtgttcggaacggttggttcccagctcatccgcctcgtttttcacacgcatacatttttaactgttaaacgatgtgttttttataaaaagtttatatataaaagttgcttaaaaaatcatatttatttatttattaaaaaatagctaatacttaatcaatcacgtgctaatgaaccgctctgttttccgtgcgcgtgtttttaacccatcgttacgaacagagcctaagaagggcctcaaacgcaatggagtctcgatctgttaggcgggcccaagctgtggatttcaccgggcccctttaggcccaattggcctagttctcgtgggcccggagttctctatcaaattaagtgagagaaaaaaaaataaaagcggagaaaacaaggcacgccgccgccgccgctcgatgcgtttccccgttcgcctctcgccgccggccaccgcggcggccgccacggccggcgccgtcctggccgccgtcgctctccgcaggtacctgcgcacccgctcctccatggccacgtcggcgcaccggcgcggcagcgccggtggaatcaccctcgtggtctccggcaagtccacggaggaccagcatctcctcgccgccgccggcggcgcgctcgttctaggggagggcgactccgtcgaggatatcaccgtgtcgctcgactccggcgcgggcgcgggcgcgggcgcgggcttcgacgccggcgcttacatggcggcgctccgggcgtcccgcttcgggaggtggatgctctggtcgcccaggctggcctccacgcacgacctcgtgacgcagtgggtgcaagatttgcttggttttttcttggcgctgtttgaattgggattctcttgttgactcctctcttgctcggagtgtgcaggaatttcgccaagcttccggtgggcgtcgtctgcgtcgccgacgtgcagttcaaagggagaggttagtgggatggattgatgaatagacagtctaagtggtgattgtttgttgctgttactgttctagatgtgatcaatccttgacactttaggtggattaattagtgttgtctgctctaatgctctctagttctgacatgtttgatggtactggatgtatgactcgagaaatagtgaacttggtggatgaatttggatttgtaagtaatccatgccatgtatgtactcgacttggttaaacagagaagtttcagaagtgagaccatcctggcaatatagtgcgagaaatgctgatcaaaacttgtttttcgatgattcagccttattgtttctacgaaaattctttggcttaccgcttacatatactggctaaaagagtccgttaagtacttgattgtttcatgcttccttttatccatcgccacaatgcgatgtgcatttagaccagatcctaatctcactgatgaatttatgcaggtcgttcaaagaatgtgtgggaatcaccaccaggatgtctcatgttctccttcacttcacagatggaggatgcacggaaactgcctcttatgcagtacgttgtctgccttgccatgaccgaagccatcaaagaactgtgttgtgctaaggtgaataatagtgcagtaccactaattcagtgattattcgttgtgcagaccatttatcacattatggatatttccctcaacagaatcatggatatttttctgagcttgaccatctttgtggttcaaatcaggggctttcagaacttgatgttaaaataaaatggcccaatgatctctatctgaaagggctaaaagttggtggcattctttgtacttcgtcttatcaaccaaaagtatacaatatttgcaccggtgagtattatttctaatactgatgataataataccattcaccaccaaatgttaaggtatttcttaagataaatttgctcttatttctatcctttccaggtattggtttaaatgttgacaatgaggagcctacaacatgtttgaatgctgcactgaaagaaatgaatgctaatttgcccacattgaaacgtgaagacatactggcatcattcttcaataaatttgaagttctttttgagatctttacaaatgaaggtaacttatatttccccctcctctcctgttgtaagtggccacatgttcaaggcttcaaccacaatgtccttttgatgcatgcccatagacatgcgttttgctgctatttttttttaactcgtgagtgatattgtactgcagtgtataaattttagggtcaaaattgaatagatgtctcaatttctattcttaaattgaatagatgtctcaaaattgaataccatgacattcttaatttctattccaggatttcaggcgcttgaggaacagtactacaattcatggcttcataggtatgtagtgtctcaatgctttggatccccattgtttgattttgtcttgaattttatctgctagcgctgtatatccatgggtcacacaggtaaaaggtggcttcccagactctggcatggcaatcagactgatcacctagatatatccatgaacaccctagtatcttttactgctaattgagtcatttgccatatgaaacttgtgtgtgagaatggttgatggaaaatatttggaaaaatgttgaatcttttgagaatcaccttgcatgtcatatattttctacatgtgattcgatattactgaggcagatcttcgctgatatgcagtggacagaaggtcgttgtgcaggatgggcctgaagcccagcatgcagacagtgtggttactattcaggttaacaccgaatttaggaattatgattaaaatagacattttcagttctctgaccattctgttctttttcaggggttgacaccagctgggtacttgtatgctattggcgaggatggcaaaagctatgagttgcaccctgatggaaacaggtattgtcttgttatccatcgctaatatcctcctcatgtgctaatcttagtatccatatactataaacttctcttctgatttctgttgtcaacaatgtaaagcgccacatggtatcagattttttttttcaagagtgacatctgagacaatttcctgcactgcagctttgatttctttgcagggttagtgcgaaggaagatggaaacgtagttctacatgaatacatacataggtagaagagcagtgtacaataatggatagaaggctgctaaaatccacatacttgtaaacatgaggggttgaaatgttttcaactatgtaaattaactttgagaaactgctaccacctttgggtttgctactgctaacatggcgccatcaggcacaagatcaaaataagccttccaattcaaggtgggattaaagaaaagaaaaggagttgacctgttaagtcctgtagagactcaaggaccagaaggagccatgctttgagtgaaatgtttctggctttctgctacccttttgtaagttgtaactttcttgaaacagtgtaacaatgattgatgcaataatatatcatctgagcttgttaacttattgtatccttcaattgttgatggtaaaaactgaaaataagagcgatgactgaattcaccgtactggtgagttaaacttttctaatggcaaaattttaggcctctctggttctgaaaggtatcgtttcaggtgtgcattcatcctgattatgaaaaaggaatgaaagaaaaaaaaaatcttataatcacaacccgtccgcttcacttgcttcgaaaaattaaagaaaataacaattgaaaaacaatatagttcaccagattagaagactcttgtgctgaagtgtcatggatgacgtactccacaactaatctacaaactgccaagtcgcagttgtttgtactcatagacttggttgcgttccttttggcttatagggtgagctacagattttcattcacgaccacttttttcaaactaataaatgatgtattttaagaagtatatagaaaagttttcttaaaaatgatattttttaatttacaaaagttaatatctaattaattatatactaatgactcgtttagtttcacgtgttgctgcagataataaaattggtttttctcaaagacgaagaaagcggtcacaaacatgatcccagagtcagctgtcgcaggacatccctgaacagacagcaagtatttctttatttctttcttttttatttatttatttatttatttatttatttactagtaatataatatataaaaaggcgcccttggctgcagctgcttcacgagtccaactcggctcatcctgctgctccgcccttctcaagatcaccaaggtgagttcctccccctccaaatcttgggagaaagatgggccctttgctttctctcacctccaaatcccctgcttcctgatccgttttcagcagccgcagtagctcggcgagccggcagccgacgggtccaatggcgcaggatgattcggttgtttctgctcagtggctgcatgagcacttagggcagcctgatgttaaggtgaagcagttttcaattttatcatctactccgcatgcaatacttagggccctcagttcagaaatacttttatgcttgaatctttttggcagcattttagaagtagtagcaaactgttcttgattattgtccagtaattagttatgccatgtaagaaggatgtggagtacagtacctactgtttagtgatgatcaatataagaaattattggttgtttgccagtttgattatagtatcttactttcttgcatgttgtttagttttgttgatctgccaaaaaaaaagcattggaagattattgattgatttgttagtaacattcgtccacttgatataggtgctggatgcttcctggtacatgcctgtagagaagagggatccatggcaagaataccaggtttgaggatcagttgtactgaaagtactgaactttgtttctgcttttgtgaaaatgttttctcagctcaagcattctgatttactcaggtggcccatatccctggtgcgctgttcttcgacatagatggcatagttgacctgacaactgatgtgagatgtttcaagatacacctttcattctcatttcacttattgtttgagactttgagttgagtaaataatcagcacaaacatccttgtatgacttgcacttgttaattttgctacaactggaaacttattctttcaattaatcaaaattttcttactgtatgaagtttttctgtccttttttaaggcatggcatataaatttagatatgtgatatatctttacttcatgaatttgtgtcagttgccacacatgctgccatcacaagaggcttttgcagccgcagtttctgcgctcgatataaaaaaccatgataaagttattgtttatgatggaaagggatttttcagtgcacctcgtgtatggtggtaagcacaaaactgtgattttttaatactgcgacaatgaagttgacagaatccacagcctttgttttacttaaattaatatgttcaacatgacaattttatctttgtatactcttatcaatcaacaggatgttcagagtttatggacacaataaaatttgggtgttagatggaggtttacctcagtggcgaacttctggatttgttcttgagagtagcacccctggtgatgcagttcagaaaactaaagctgctaacagtgttgttgaaaggatttataatggtcaactggtaagctggctataaatacggtctaactatgcatcatgcaaactgtttttaacttattgaagatttatggattcatttttcaggcaagtgatgtaacatttcagactgaatttcagcctcatatattctggacactagaaaaggtcagcctttccttttataactgaaaactttatagagttatgaatgaacatgaccatgaactcacgcgatgtgtttctttctatagtggtctccaactctaaactttaggtttcatgatcttaaatttaacctcgttaaaagttgtgttactttaaccataaggaaatgaagatgactgtcaggactctgaaaccttgattatccctgtgtgttgggctgtttttgttttgaacaggttaaacataacatggatgcacagtctcaccaagtcgttgatgcccgatcaaagggcaggtaagttctcctaatctttagtacttagattgcaatatctatttatagaagttctaacgataactataaggtgctagtatgtaaagtgccaatcaaatatgattacttatctctgtattagtagaataagtagtaatagataccttgacagcagtttattacttcgtgaagaaaatcacttgcacatcgtttgcagatttgatggtgtagcaccagaaccacgggaaggagtaagaagtggacatatcccagggacaaaatgtgttccattccttgaggttggttataatgcaaatatgcaacatatcacatggtatttgggtagtcacagacttctaaaaactggcttcattgatcttgttacagatgtttgatgatgcaccaatgcttctccctgcagatgagatccgtaaaaagtttgagcaagcaggttcgaaactctgattcatctcactatccaaaaaaaatgtagtttggccaatgtacacatgaaaagtagaacagatatttcaacaaatcaacagtgtagattttcttactcaagagatgatatttcttagggatacgaggatactatagctgtagaattatgaaaatttcaccgagcaaaaaccaatgacaaacactcgtttgacgtttctgcagggatatcccttgatcgccccattgtagtcacttgtggatctggtgtaactgcctgcatacttgctttggtttgaaacattacctgctcatcttagattgtgccatttggttgtaaagcactctaacaactatcactttacagggactctatagaattgggaagcaagatattccagtttatgatggatcttggacagaatgggaagctctaccggatcatgattatccaaaagttacctccaatggttcttaaaatcatcagctccgaaatgatggattcatctgctgcatttttcaccattcagtttagattgtcagctggactgtgttctctttgacatgcttagcgtttgaatcaaaaggaagcggaaatgtgcactcttggcaattttgatgaggccatattcaatattaaacttagatcgatgatgtactgaatgttatcgttaaacaataataagcataccaattgattttatatcagaatgacaaactgtgttgtcactacattatttttttttattagttatgtgctctgtaacagtgcaataaaatgaatttgtttaccacaagtgcaagtccgcaacctagtacctcaggtagcaattcgttttacataaatataaataaaatgattaataattgctcaactgagcaaatgatatttgtactaggtacagaagataaaaatctctgctccccagtacaagttgagtggcagtacaaagttatcgtcctttgctataagacaaatactctctactcagcaagtttttggctaattattagtcagcccatgctcatggatgcaaagaaaaatggctcaattctagacccttttatttattcttcaattgaagttttgaactgacaagctatttcatttcatccaatggcccatccagataaatttagctttactgtcatatattggggctggaatctctttgcatttccaaaatccagaggctctccacccatcaggattcaacacttagcagccatatgacaaacatgaacagatcatgtaatgtccctttgcgcctaatctgcaacatatatcattttgccttccagattcttccacagatcattcagacgcccccctgaccacattacaagaatgaatcctcgaaggctctcaagcaaatggcaccaaagtggcacaactggattcagcaaccatttgcttagatttatcagtgcattttgagtatttgacagcagaaaatccacatgttgaatcagccgacacaattctcatcttggtgtacctgaggaatgctatcttcgttgctaaacatggtgagttctccaccatctgctccaagatcatcagcaaccataaaggcacgaacaccatccttctgatctatccagctatatccacgacctttgacaactccacgattactcatcaatgccctaacagccgatgcatccccatgtcggcccaaagacgcatatatatttgacagaagtacataaggagatgggtttttaggatcaattcggaacaggtgctccgcagcacatttccccaattcagcattgtgatgtacaacacatgcagcaagtagaacttcccagattataggatcatctttgcatggcattttatgtatcagggcctccacttctacaaagcggccagctcttcccagtgcatctatgagacaagtgtagtgctcagccaatggtataatcccataactgttctccatggaattaaagaatgccattgctttgtctacgagcccggagtgactacatcctgttaagacggcgatgaaagtgacagcgtctggcttctgctctgtagttagcatatactcaaataattcaactgctttgtctccaagaccattctgagcatatccatgtatcatctcattccaagcaactatgtttttcatcatcatggtgtcaaagaaaagacgcgcatcatccatgttaccacatttagcatacatatcgataagcgcactgcccacatagacattctgatcataaccatctttcataacctgagcatgtatctgcctgccgtgaggtatagaagacaatctagaacacgagtttatcatactagcatatgaagattctgttggcatgatcccattttccctcatctgcttgaagaaatcgaaggcctctttattcaaggaatggatagtcaagcctgagatgatggaattccagcaaaccacatctctctcggtcatcttattgaaaatgctcctagcaataccaatctgaccacatttcgaatacatatcgaccagaccactagcaacaaacatgtcgttgtgaagcaggaatcttactgaagcagaatgcacctgcctgccaaaatccaaaattcctaatttagagcatgagctgaggatcacggccaaagtagtccggtcaggctgcacattttgatgctgcatccttctaaacaactcaattgtatcttgatgctgttcctcctggcagtatcctgacaaaagtgtgttccatgtcgtcacacttggccttgatatcttgtcgaacattgcacgagcagaatgaacatcccttgccttaatacaggaagcaagcaagttactgtaagtgacctcattgggctcaaagccagcctcttgcatcaggctaagtacctccactgcctttgcacagctaccctcttgaccaaatccagttataaggatgttccaagacacaatagtgacactgggcaacgactcgaaaaccttgacagcctcatccatctccacgcacttcgtgtacatatcgatcaacgagttccccacatgttggtctgatccaaacccttttctgacaactaatgcatgaatggcctgtcctagccggaatgctcgagcaacgctgtaatcagtagcgcaagcttgcgcgcaggcgccaagaacactagagacagacacgggatcaacaggaaccccgctcctgcacatcctcgcgaacagcctcagcgcgtcgtcgatggaccccgtctgcgccagcccacccatcatcgccgtgaacgacacctcgttcgggcgagccattccgtagaacagcctcaccgcgtcgccaacgctcccacacttggtgtacatgcccaggagcgcgttctccacgaactggttggcgtcgagcccgaccttcaccgccaccccgtggcaccgcctcccgtcgccgagcgcggcaaggccaccgcacgcgctgagcacgctggcgagcgtgaagtgcgtggggagcagcccctcggcgcgcatccgcccgtacatctccaccgcctccccgccgtcaccgggcgaccgcgccagcgcggagatgacggtgttccacgacacggcgttccggcgcggcattccgccgagcaggtcacgggcggcgtcgaggtcccccgcgcggcacgccgcggagagcgcggcgttgtaggagtagtcgttggggctgggcagcgcgcggaaggcgaggagcgcgtggcgcgggaggcccgcgcgggagtagagctcgacgaggcggttggcgaggaaggtgtcggcggcgaggccggcggcgagggcgcgcgcgtgggcggccttggcgtgggcgcggctgggcttggggctccgcttgatgcaggcctccaccacgccggctagctgggccgccgcgctcgccatcttccctgtctctcaaccgcgcgggaaattcacgagcaacgacgtcttttatagtggccgggagtagctgggccgtgagatgggcctaaggttgatttgggctcacattttagaggcctctgtttcatcgtgcaccagtgggccgtcaaaattcgtcaacttctcttctttttttttgagaaaatccctttgtgtacccactaatccgttccatgccctcaaatcatacttgatcccttctgacttgtgtacccaaaattttgcttcaatctactctctctgtttcatgttataaaactttctaatattatccacatttatatatatgttaatgaatctaggcacacatatatgtctagattcattaacatatatatgaatgtgggcaatgctaacaagtcttataatataaaatggaggaagtagtttctttctaatacggtgtattaaggtttttttttggttggacgttcatgtctaaatacgctgtagtagtaaacgtcccatccaattctagatttatatattctgggatagaaggagtaccatataattgtttccaaatttacctaatattagatgctcattttttttatcaaactttaaaaagaataatgttaccatactttttttagccattaacatatggtgcctagaggagatcttgttacaactatgattgtttaagttggttaaactgttgtctgaacttagacgtgacaaaatgcgacttgtttgtaagtgacaaacaaaacaaacaaccctgatgctaacggtggtaaacgaccaacttctcatgtccttgtacatttgatattcatagtagtagcatattcttgagaaaaaaaccatgacttttgtgaacacatgttccgttggtaaaattgcatacctacgctacgtgagcgcatgagttctactccctctatctaaaaatataagaaattttatgtgggcattggacgcatcttaatattacgaatctagacagacttccaaccactacgattaaaaaagaaaaaggttcttaaaaaaaatgtgggcgcattaattcgacctgtactaacaaacctaaaaaagaaacaaatgtttatgaccagatacagcaaatcctaggtactgtaactactagtagcagatagatttgccgggtgttagatccgatcgagaagaacaaacagttacagctagcccatggattagatctccgatgataaatcctaatcttaatgcagcaaccatgatccatccagttcatcagttggtgcttttcatgaggcacacacgtgatggtcatggtcctcatggaccagcaggagcagtgtatcagtggatgcacacatgtgaacagagccaacagcaagaacagatctatccacttcgcttaaacatgattagccacttacttttgcttttcaattaagaggcaagatgaactgatgttcactgataacaatgtatgatctgatctgaacttatgacaacagttttgtcatcattaaccaggattatcaatagaatgcgaccatatccggcaagaaattaattaaggcttctaattaagttgtaatctgtttttaattactgattaataatgactttgatgtcagtcggtcaatgtggctgcaactactaccgtgatggggagatgagaacaagaagatggatagatgcagcagtttgttgggaagaagctgtcgaaagcgaaataccatctgctgctgctgataagggtcataactttgcatgcgtttcatggcccaagtttcagctgtgtgtggtcctcttttcatttttcagacaaatgtaactgtctctggtcctgcttgtttgtagctagatctgtactggtgttcactggcttaattatttggcaaaccagctaatacttgcatgaattttggcggaatttatatcagccacgtacgacaggggtattctgaatttgtggtggaattgctgagcagagtgaacttaatttcacactgaaatttaaggtactgtttttctgttcactatctatttattccttacaggaagaatttatagtttgtaaccatgaaacacaacctatttatttagcctcgtatgtattctggatctgtgatagaattggtgaccattaagtacaacaggcggatgattattcaaacgattaaaaaaaaggttcaactaatcgctaaatacagagttccgacgtccagaaaaaaaaagatcgtatcgcgttaatgaaacggttttgttattgtcaccgtatacaagaatgtagcaatacattactccctccattaaaaaaaaacacaatcttgagtttaaatttggatatacactatgttcagattcaagcttagaattgagtttttttttttacggagcgagtataacctactttaatgaaaaaagtccttgatgaattaataaactcatttatctccctccagaaaaaaaaggggttaaaatcgaaagcccacatcaggtttaggctacatacaccagtgtacagtccactatacacccacccggtaaaaccacccccctctcaccgcccaaaacaaaattccaaaatcacctcctccccaaaaccgaattttaaatttgaatcccggtaatctcaccgccacattcccctcacccaccctttcccaataaaattccccacctccccccctccccacgcttcccaccccccaaatcctcctccctccctcccctaaacctcgccggaatccaacccctccgccgccgccatgagggagatcctgcacatccagggggggcaatgcgggaaccagatcggggccaagttctgggaggtgatctgcgacgagcacgggatcgaccacaccggcaagtactcgggcgactccgacctccagctcgagcggatcaacgtctactacaacgaggccagcggcggcaggttcgttccgcgcgccgtgctcatggacctcgagccgggcaccatggactcggtgcgctccggtcccttcggccagatcttccgccccgacaacttcgtcttcggccagtccggcgccggcaacaactgggccaaggggcactacaccgagggcgccgagctcatcgactccgtcctcgacgtcgtccgcaaggaggccgagaactgcgactgcctccaaggtattttgctagatctgctcgttttgtttggaatggtgggagattgggtgttgctttgctgcattccgcgtgtagatcttgtgttccatgcttgtcgtagcgcgaatggtgggggaatgctgcgattctagggttcttagctcgtagatctggccatttttttttactgaacatgtagatctgtgtgtttcactgcgcaatccattcgtggtgtagttggggaggagatgttccaactgctgagatgtggtgattagcacagtaggtgtggtggttgtcaacaaccttgttaagcctttcctcgtgtagtacttaagatgtggtagatccggcacaatttcatttatcattgtatgcttgattggttggtttgttgccttgcttagctgcaaatgtggaactctacattcccctgacttgtagtaaactgtaatttttcgcgagttgttgaaggcattttaattcgaactgacacttttacacttgcaagtgtaactgcaagctactaaaatggtagtagaatctaggggctgtaattcaagttttacctttgagcccagcttatcttaaggttgtttctggtgcaatactctgatatttgctagaatgatagatgcagttaggaaaataatgcagcatattgttgtttagttctactgaataggtatgctatgtggtttctgtcacattcacacatcagtagttcacttggtggtgccttaagtgaagcgcttatgattcacgctgatgtgttgcagtttgtgttcaacatcaactgaatattgggtaggaattaatgtatgtgctccatttgccacaggatttcaagtctgccactctctaggaggaggaactggttctggtatgggtaccctgctcatctcaaagatcagggaggagtacccggacaggatgatgttgacattctcagttttcccctcaccaaaggtttctgataccgtggtggaaccttacaatgccacactatctgtccatcagcttgttgagaatgccgatgagtgcatggtacttgacaatgaagctctatatgacatctgcttccgcactctgaagctcgccacacccacttgtaagtgaaaacatgccataattatggtactgtgctcagttatcgtactctgctctatgttgttattgatcattgatttcatcctggtacatcagagcagtttataatcagtcacctttatgtcagatgccactaccaatttactcttttgtgaagtacggagtataatgaattagctggtccatgttccccattgttgtgtgtttcatgcatcctggcactacttgattcaattaatgagtatgtctggaacttgcattcgaatacactgatactgaatatatagatgataagtctgtactacatgtatggggtctacagtgttgatatgaatatgggtttcttcatgctgttttacctaattctgactctgctttgtttctttccttttgcagttggtgatctgaaccatcttatttctgcaaccatgagtggtgttacatgctgcctgcgcttcccgggacagctgaactctgacctccgcaagctggcggttaacttgatccccttccctcgtctccatttcttcatggtcggctttgcaccgctgacctcgaggggatcccagcagtaccgcgccctcactgtcccggagctgacccagcagatgtgggacgccaagaacatgatgtgcgccgccgaccccaggcacggacgctacctcacggcgtcagccatgttccgcgggaagatgagcaccaaggaggtggacgagcagatgctcaacgtccagaacaagaactcgtcctacttcgtggagtggatcccgaataacgtgaagtcgagcgtgtgcgacatccctcccaacggcctgaagatggcgtccaccttcatcggcaactcgacgtcgatccaggagatgttccgccgcgtgagcgagcagttcacggccatgttcaggaggaaggccttcttgcactggtacaccggggaggggatggacgagatggagttcaccgaggccgagagcaacatgaacgacctggtggccgagtaccagcagtaccaggacgcgacagccgacgacgaggaagaggactacggcgacgaggaggaagacgaggttgctgcctaagccacctacctgcctgccattcctctcgctctcgtcatccatcgtagatgatgattgaggatgtgctcccttgtgttattattacctagtactgtattgcaactgtcgatctgggtcgtaagatgtttattttaggtgatttgatgctctagttactcttttttttccttgtgttgattaatggtgtgttgtcgatgcgaattgtgatactagctttaactgtggacttaaattactagatcctggaattgatactgtttgccagtaatatcgtgtgttgcgtgatcattattttttccactacgaatacactgcgatgtcattagtgggcgtgtgctaggatgtaaacgtggatgcagttgttctaagcctccgtggtttgcttgttatctatcttatacagccaaaatttgaaatctggaacttaattttaagttaattttggggttcattcatctttcatttcccatatcgacttttaaaatacaatggcatgtgtatataagttgtgcccataaattactttggggtgcttagttcatttcccacggctgatgagccgtagatggaacaatcagagctgcaacttttgtagtattcgttttctgagccctaaatagctataatacttatacttgtttggtttgttttatagataatggaatttatttgagacaaatcggagtcagtaatggactttttcaaattttttggattcaagaattgtatcgatgtcccattcgaacaggcatcaaagtcgttgtagtatagtggtgagtattcccgcctgtcacgcaggtgtgacccgggttcgatccccggcaacggcgtttccattttttttaatatgaacgcgtctagtccgaatcgaattttggtcgggtacatatattttttacaccgatcgattcataccaacgatcgatcctacattgacaagttccaatgttgcgttgctccggcgaatcagatcatcgtcgactaatggccggtaccggcggcggcaaccagcagcgtcaacgacagtatggacggctacctgcttagtagtgtagtgttctggaaaaacattccaaatggtaacaatttttttgccaatgccaacaaagattagcttcaaacaaaatggttgccaaattttggtatggttgagaatggaaacaaaccaaattttggtatggttgagaaatatcacaaacatcgatatttaatagtcatacgacaagagctctcaataatttaaaattttaatcatactatatgccaggatcaagtctgctcaacacaagcacaatcaagtgatgcagggacaaataccacgagtaaaacattactacatcgacattacaacaaaaattggcaatacagctcaagacatctccctgaatcttgccatagccttcttctggatgatggttttgtagctatcaccagcttgcgcctccagcgacgggtcagaagatttccgctgctgacttccaagtccagccctcacatcgacagatttagcctgcactggttccttgatgccactaccagtttttccgagaccctgaatatttgcgaaggaatagcaagcaaaagagattgccaatgtatactcaagtcagagaatattcgatttacacagcttccagactgaggaaatattggcaaattgattcttctgcagtcacagttaacttctcttgtctcacaaactactcaagcctactggagctattttccctcaagcattagtgatcagtaatttccacatttattctagccttacgaggtagagccaacaaacacaagtaaatcacaagaaatgatagtttatgggtcaaacaagatgataatataatccactaaatttccttgcgaggaagcctaccagcgagattcgacaatcaataagtcaatacattagctttacccataacagataaagatttgctcaactcagtcacaagtgcaggaaataaaattctacagcctatataatgcaacggcaagcccaatataaaaaacaatgagtggctggacaaacaaaaacggacaccagaaagaattattcaaatacaggcagcagcaaggaaagccatcaaagagtaataaacaaaattagttatagaacgtaccagtccttcttgccaacccatattgcgcagaatacgattgcccacattgctctcatctattgctctatcagcagtgataacctcataattttcagtattgccaatttcaccgctagaacgttcacccacccctggaggaaatggcattgaccccatctcacttggaccccttcgagggtactcaccagcttgacaaggaatatccagataattaatacaagtcgatcaagctatataaagagaaatagccttttattgtgccccctccgattgtgaatacctagttctactacaagtttacaactttatcaatttacgtatatttgtaatctaatgtttccttaaggtcatgccaaaaaatactccactcaactctacccatatcactgcgttttactatcttttagtttgcatgcttgtggtgttattgggagtctctggtcttattttattcaattcatgatgtgctttggtcaaagtgacaagtatctatgagtatattttacaagctaaatagaaagtactgtaatgacaaaaaaagctatgctgtggatggatagtaaactcttgtgctaaacaaatgaggctagaaaataatgtctgtgagagcattcttacttggatccagtccatcattatcacttccaagtgaagaagatgatccatatagatttcgcctttctgcagcccgatctctgtactgtgaatgtcctggagcctcagaaaaccgacgtttaccactccctgaaactccagatggagtataagatgctagagcagataattctgttttgaagggagcagaagtaggtgccccagcatttgctgttaacccacatgtgcttgttggtatgttggagaaagaatcagcaccaccagcatcagatggcgcatgaaatgcagtgtctgatctgactattcctctaccagagcctcttatgacacccataatggtagttcctaaactgttactgacaggtgtaggctttatatcagaatctatcatttctgtgggtgcagctgttcgtccaagagaattatagctagcaggcgagttcatgtccttagcatttccaacatcagatttaggcttagctttcactgcaaatccagttgaattgtgtaaattgtttaatttatcatcagcagagttggatggttccttgtcatcaaggatagcacgccctgcctggccttcttgatttctttgtttccacattgctaggacattattcatctttttcttattcgccaaaagactaccttttgatgccaacttgatctcttttgctctctccttttctttcttttctgcagccagcgctgcacttgcagcagcttgaacagcttcaggtaatgaagttttctcactttgtttaatcgtggctgcaggtgcagaaatcactacatttttaccactactttctgaggtcttcgtgctagtatttgccatgtccccagctgctttactgctgttctgttcactacaagggacatactgttgagtttgttgatcatatgaataccacactccagcattaccatcatagtaaagtcctgaaaacaaatacaaggttataaactgtaatactttaacaattgacatggagcaaacatttttttttaaaaaaaaggaaaattggaaaacatttcaaaaacaagtcacatggaaagtatttctgaattgatcatagtaagaaaattgtggcaatatacataccggtatttccatcataatagaatcctgaggctgaatcatagtaataaccagacttttcatcccaaacaaatccagactgtggagcagagccactgctctgaggttccgagttgctattcagtttgtcatcaggattgtactcttttggggcccaacctatagcatcatactggtccaaagggtaaaagaaataaaataataagcatcatgtctataatctgcataaattgtatgtgaaaaacaattgcaccttaccctacagggtgagaaattattggttttagtgcatcatttaatggagttacataacagcagttctcattttcttcaatgcactgtttactttcctgtgcacatggtgacaaattacaagtaggggctacaactgacctgctgagaaaatgatgcagcctcaatggcagctgcagcaaggctgtttgactgtgaagcccctgataccggtccatgtgtgcttttagcataagttacacgtaaaacctgaccattcttctcaagtgtaatcccattcgtagcttcaagagcttttgtagcttcttccacctaacacaattggatgcagataaatatgggagtagacatcaaaggaaaactcaacatttttcccaccactacttactgaatgaaaatggatgaaagcaaaacctctggacacatgagtaaacttatcccgaacaaggcgaatgtcctgcacaacaacagcatgtcattctctcaacagaaacggaacactgcaaatttcaagagtcataagcttcttcccacctttataggtgcatgcttggcaaattcatatcgaagcatttcctcgtcagcattttcatccagaccacgaacaactaaaacatgagttggacctgaaaatgctagtgtctaataaggcaactggcaaaatagttttaataatcctacaatagaagaacagagctttgcctagttcagatcccctttttggatggagtggagtagaacttgttggatcagctggtagagaatcttccgttcgtggttcattacactacaagaatagaatgcaattaggcaaaaaaaaatcaagagcttaaataaacaaacatacaatcagttagaaagaaatgttattcccctgatgcctttataattgtcatcttggtccttggagatagacaaagtagttttcatgacaaattcactaatggcattttccatgtgacacatcttattattttgtttatatttatactagtggctaatgatccaaacatcatgagttaatccaaaagcttacagtttatgcaattatgacactacttaatttgcaacttctcattaacaatagggatgttgaatcgaaagggaaaacagtactccatcaaggaaatcgaggacagagaaacaatccaagcatgctagattggatttataaacagaaatgacatcatgcaaacttctgtaagacaatactaaatgcaatgggtattgcgatgaagaacacgcctacaaaaataatttacaacaatacagagtaaaacatacctgaaaacatgaagttctgcgagcaaagttcatgcatccacatatagtacatatccaatcacatggcgcagcagcagtcctgtgcccatagttataccttgtaaaattttcttctccatgagaaggcccactcatcccactagttggtttactactgcagtaaacaagttgccagcagtaattacagtggaagaaaaagatataagtatatacttttgcaaaaggtaagatgcatgtaaattgttttttctcaatgtgtccttctgcaaaactaagcttgatgcaagtaatacacactagacaaagacatgaataacatccaaaagaaaggaacgagcaacttaacacactgtgaatctttaacacaccaatggtagattgactgttttgcatcgcaagcttatcacaatataaaaacatttacatgaccttagcaatatgctaccaaaataattagatatttttgtgccctatttggtcagtcatatgctatttggatcattgtattgctaatgcaatcacatagttcaattgaaaaaccttaagtgggaaaatagtgagcagtgaaacaacaaaaggcagagccacacgagaatttggtatatgaaagacatgctccagtgaaaaattactattacatgatgcacccagtttaaacagttcaaccattattgaaccatcgaatatgctgcaattgtgttgttcacacctcagtatcacgtaaagcagactactcaacaatgttacatacaagtaaactggtgaataaatatagacgacttcagctattataagaaaacaaaaagggcacgtacctgtactgaaaaaatacctttctaccatcaattagaaggccattgtctccaacaccttccatcattctgcgggcagcttcctgtagagtacaataaaatttctgagcatgacactacacgacggtctgaacaggtaaggtgatagatcttttacggttaataccacagtagggaagtcgataaaagcaaatccccgagacatgccagaagatcgttccttaattacgcgcacactacggagagggccccactcagcctaaaagatatcagactccaaatgattaaatcgaaccagacaatacacttgcaaccagtttaacagtttatgaagaggaacttgtacaagaatctggtttaggtcatcttcattagtcttctgggacagacccttaacaacaacagtagcagatggagcctacaagcatgaatggaaatgttatttgattcatcagttcaaaacacatttgaagcatgcaattatgtacaaaacaaaggaatgaccataccactaaatctccatgccttctctcatcccagtcatactcccttcttctgccaaaggaattgtcatcataaaagccatctctttggttccgaccacgacttttgccacggggtgatcttgatctagaccgagatcttgatcgttcgtcacgcccacgagatcgtgaacggctatgttgcatgtatggacttctgtctctttcatgactcaaccctcttctttcatgttcactctcacataaatcacgccttctccagctaccatctctcctgcttttctcatagtccgaatcatagctgtaacgatcataatcacgatctctctcatagctatcctctctactatcctctctactttggtgagagctgcggtaccggtcttcaaagtcaccgtgaaactccgcacggtctctactcccaatccttttgttcctatcaaaacaaaaatcacggtaactaccagattcatagttatcagcagcataattatcgtggagtatatcaactcctccataggattcaaattcatgatgctttccatcattgcaatgataagtgtcatgccttctgtaatctctagcagttgaatattcatcatcatgaaaccttcgaggttgagacaacatggggacagagggtgcaggtggatacacatttctatcatgtgtgtcctgatagaatgccccccttccatatgaatctcctgggaagccatcatccacaaacctcctaccattgtaggatccaccggccctgcaatttgagtcaattgtagaaaatatggtaatatgacagagcacattaaagtggacaacatgtcataatggaaaaaaatattgcaactactcccaataaattatagctgagcacacttcaaaagtaagtcgaatagaatggaagatgtgcatgactacaaccgctaacaatctaacataccatcacaatagcttattgacttacctataatctgggccattgatgacaccatacccatccaatgcctgtagattcaacagaagttgagtcagcaagtaagtctacagaacaggcatgtaacccattccatttaagcaatggccgcttcttcaaattctttacatcacaatgctggccaaccacatggccagcaaatctgctattccttgttagctaataaagggaaaggcttcaattacactgttgttctcccatccatgctgtggagcataacgcccatgatccatttctgatattcggcactgatgttagactgcaaagttcttggagatcttcagaattttgggtgtagatttttctactgtcctgtaagagatgcatgatatcacaaggttaagcaaatgccaacacgaaaaccaccatactggcacccttctactgcacattcaatcaactaatcaagaggacgttcctttgattgctaatcatctcaatatcaaattccacttttcaagtttcacttttttttatagcaagtgtctgttccccttcttagaaatccctccaccatgtgattagcaattccaagtaataaaccaacttcacaagttacaagattccatattatagccacttggtttacgattttgtacgtagatgggacggtggagaatgaaggggacgatagaaattggactatttggtatatgattttgcatataaaattgtagatttgatagtggacatggaagtgtcagaggtggagccactggacttggcacaatgttgtaaagtcaaatgctgttgcagcaactgcacaggcaccctaaacaaaaactatacttgattcattagatcatgattaaaatctcaataagcctccgaattctaaggtagtaaattacgatatgccatggcttagaattcacatacacacaggcagcagcagcacaaagtcaaactatcatgacaccatccagaatctctaggttacccccaagaaatcggcaaaattttaaatcgccagaagttaatccactagggcgattcccacgacacctccgcaaaacacaaatcgaagacgaacacgaggtatcctgacccgtcgcaccctcatcctcctctcctactaccactttacctctcgattccgcgtgaggtcgccggcgtagcggggaccaggcggccgtcggggcacacggggccgaaaccctagcgcgaatcgcgatccgcgattcgcgcgcaggaccaaaagtaatcctcctcccgccgacggcgctcgggcgagcgaaggaggaggctagggtttccgcggcgggcgcgcgtggcgttcgatcggcggggggaggaatcgcggcggcgcgtggcggcggcggcggagcagtggtggcgttgcgtgcggctttgagctgtcgcgactcgcggacgctttggtcgttagcgtcttagcgagagagggcgaggacgttggagagggaagttagaggcccagtgagcttctctgttgggctatgtgggccgtggcccaatgctcctaacgcccaaacgaatacgagatcgatttattatttcctcggtcctattttttgcgcgattgctaatcggcgcgcgtttccggcccataaggcccagcgccggcgcgcgcacgcctcccactctttttttttgtttttctttacccattttttttcgcattttcctttttttctgattatttttttaatctttagcatgttttgagtttgaaagttttaaattttgagttgaaaattttcaaatctggactagaaagtttttaaatctcgagttgaaagttttcaaatctcgatttgaaagttttcaaaattttcaaatctggacttgaaagttttcgaatctcgagttgaaagttttcaaatcttgatttgaaagttttcaaaattttcaaatctggacttgaaagttttagaatcttgagttgaaagttttcaaatcttaaattgaaagttttcaaaattttcaaatctggacttgaaagttttcgaatcttgagttgaaagttttcatttctgagttgaaagttttcaaaatttaactttaaattttaaaatttaaatcgaaaattttcaaatctaacataaaatttttttaatctgttagtaaaaaaatctcccgaatcttttctaattactatcattagtgttaagtatattaactaatagaggtaattaagtatattaactaatagtgttaatagaggtagttaataggggaggagtgctcgctagcagcgagcacgcgttagctaggagccccctatttttttgggactattttatcaaatctttcgatggagagcttcaaatcttacaggatttttaactaatagatgcatatctttgtgaatgaaataaaacaaaaaaaaagacaaatatatcaaaaatcgtcaatctagagaaaaaatattgttgtaaaatctaattttgatatacatcgtaagtgagtgcaagtgctctgtaactgagtgtaactgcaagttagatttatagaaatataaatcttgatgcaatatcatatacggataaaaaaaacgaaagatagaagtccaaaatctgtcaaaagtgaaatagcaaaaccgtaaaaaagaaaaaaaactcttcgattatatggaagatacgtacactcacattccatgagtacgtcctctactcatactagcataagaccattacagttcgactagctatgatagatcttgtgtgaattgtgatgccaatacctttcttgcagaaatctctccaatttggaacaatgttatagcaacatttgcagcatgtattaaaggagaaaatacagttatccatcatcactagattaatttttccagcccagtcggtacatgtcccttcacagtcacaggtgaatggaccaagagtgagactgtgagagctagccggtgtctccatcatcagtggaaaaaggatcgagcagatgtcgacggaaggtaaattctacacggtttgtagaagacgatggccgcctacgctttcactcgacgtcgacgccacagaatacgtacatatagactatgtttagttcacgctaaaattgaaagattggttgaaattaaaacgatgtgataaaaaaattggaagtatatgtgtataggaaagttttgatatgatggaaaagttgaaagtttgaagaaatattttgaaaactaaacacggcgattacctacgtacggcacagagacggcaagacacgtatagatgatgtatatttatacgcgctggtaaaaattaacccaaccacaattaattcgatttgacgaccaaaaaaaatcgccctctgctatcgttgtcagcagaaaggaaaaataaatttggtttcagaaaaaaaagaaattaaaaaaaaaggcagctgctagctactcctacctagcaggtgtagaaattaaagaatcgatcgattgatcgaggagatcttctagaagactctggaggggaaattaacaagaggacggcaccgtagaaagcgaagcttttgacgaccattattctcgcgtgctagctagctcttcacacgtacggtacaaacaccgtgtaaaatattgtggcatcgagatacaacgccacgcaaatcgatgccttcaatttactgaatcatccataattttaattagcgtcgttataaacaccagaaatacttcacctacgaaaaactatttggcagttccgcggttgataggtttcgtatgtgcatggctgtcagttcatctcaatatcgcaaatgtagaggttaatttggtgaggtctataaatttactaaggggctattcaggtcgtaaccaaaataaaccttacgaaattttggcaacaccgaaaatttggcaagttgtcaatattgtcaaaattttagcatgatttcttatgtatttatctaagtttaacaaaaaaaataaatttagacacttgtttttttatataattttgtaaaaaaaacagtatgcttgaaaataacatcaatctgaacagccctaagcaacttttaatatcgatatgtttatatggctaagatagaagggacacttagtatacatgcaggcatgcttgattgccatttaattagattaggggattgctataagggtggatctggattgtgagtatgggaaatcggagtggttgaaggtaggggtggaaacgagccaaaccgagctaagctcggctcggctcgtgaaagcttgatcaagaacaggcttagcttggctcggcttgataaatggaacgagcaaaaagtgcagctcggcttggcttgtataaaagcttgagccggctcgagccggcttgcgatgtaagcaacaagtagggccggcgacgcaggggacgtcgagctcgagcggcactggggagggaggccagaggcaacgtaggggagggaggcggtgccgcggcggcacgaagcgtcgagccgttgatcgtcaagtgtcgcttgggagggaggccggagccggcgcagccgcacagaggagggatgcggtgggccggcggcaccgaggggcgactagggactggggagggagacggcgggccggcggcgcaggggagggagccggaggcggcggccggcaactcctctcgccaatcgccgccagacgctagtcgtgcgcgcgagcggcggcgtgcctgcgcctgcgtgggatggggaatggggagggtcagcgagcggttagggtagggtagggttctctgtttctcatgggctagactgaaacaacttgttaatgggccaggtcaggacatgtactcatgttttccacaggcttgacgagcctactgtgcggcttgcgagctagctcgggctcggctcgatttgcaaacgagctgtggagagagctcgggctcggctcgtttaatcttcgagccgagccgagcttcacgagctcgagccaagcccgagccgagctcacgagcccgagctttttgtccacccctagttgaaggtgagagcatcttagatatatggcgctagctatcaaagacttggaatacgttgagctagctgccacctagcccaacaatattgatagtttggaatatgtattttggaatacatgtcggtgagggagaagagaacgatggttactgtagtgtaagcaaagatcttaacataatttggactgtccaaaagttattgaaatttatggataatttttagtatctagaaactaaaccatctcataagaatatgctaatttgacaagacaattacagttaactagttaaggcggcataaaattaaggtatatatcacgctagaagcagctagttgatcgaagtttgcagtaaaatatgcatactcgtcgtttaattaagcgggaccgtaccataactaacaacacctttttaattaaggtccgatgtctagattagcagttagtttattcgtgagttaatttaatcgcaagacatagtccattctagtagactccgagtcaaaaagatcgggatgtgagtaggagaaaagcacaacgtgcctttcagcagatagcttttgaaaaacaaacagcgaactgatcatagtacgccattaaaataacacccgtgtttgaaatatctcacgcatgatgcatccgagctaattaattgatcgtctagtcctattcttgctcctgatcctagacgttaattaatttacaaggaactattacatgttgcatgctaaaatttggagtccatatatagttatacatatatttacccatttcagatgaagatttataatatacttagataaatatattttttagatatattagtcttagcttttgccctccattaatttgttgaaattgtttagtttatctttgttgagagaacgtccgttgtaacaagcgattgaagcttgtttgaagcaaatatcataattcattccattatcttaaaaagaaatttacagtgtttgaaaacatacttatactaaaattatatactaattaaagattttgatactttaaaatacctcgtgcctggtactatcaaattttatattagaaaatactctctcccgtcccgaccttctcaaggataatcatattctaaaaggaagattaattattttttttccttttatatatagctgtcgtcaaattaaagttatgttgttcttggtgacaaccgaaagatatgcatatatggtttgatgtatcgagatcaaaagtcgtgctttcttgcgtgtggccgacgggtcgctttcgtggcatgcaatagtaccatattatagtatgctgcaacttgaccaccgtgcagtattcgtacgcgtaggtacggtatggtagtagctagtggtacggaaagatgagccaaacggtcctaacaatccagtagtatcatctttttttttcacttttctttttcttttcatcaagaaagaaaaaaggaaagcatgggaagatatgataaagattggagagcatgagatatgatatgcgatccaggcatgcaccaaagtggagcagtagtaacaactaccgttaaattttaaatcccaaataggtctacaattcacaagtttgactcgtgcgtggttaattatatatacaggacacttttatatttcacaaagtatatttccatactattctttttcaattacatgcacgtgcacatgcatacccgcacacttttaaggttgctcgtttggtaattagctttaccaacttatacccctcatcttttacgcgtacgtcgctttttaaacggctaaacgtgtgtatttttttaaaaaaaatatttataaaagttgctttaaaaaatcatagtaatatattttttaagttagttttagttgatacttgattaatcatgcgctaatgatttgttttgtttttttccggaggagaaggttcccaactcaggacaacaacgcaacctaagttcagccttttaacacacgtttagtacgtataagtaggtcatcgatcaggaataaattcagaaagcatcatacgacagttctatcttcaaaccaaaacaaaacctattacgaagcttcgtgcgattgacacaactcgaggagcttacacatgtacgagtggtgatatatttaaccaggccggcatgactaagactaatgcaagaacggagagaaaattacattggtcaaagtaattgactcttaatacttcatccgtttcaaaatgtttaacaccgttgacttattaccacatgtttgaccgtttgtcttattcaaaaacttttgtgaaatatgtaaaattatatgcctacataagaatgtatttaataatgaatcaaatgataggaaaataattaataattacttaaaatttttgaataagacgaacggtcaaacatgtttaaaaaagttaacggcgtcaaatattttgaaacggagggagtaattgttattgctagcaagcacatgtaatgcatgcggcgttgaattttctctcaaaagagtgagaagagatagggtcgtaatacgtgtacaccgtaccgtgattccggacagcacccgtacgcgtgtacggtccacgtggactccaacgacagtgggccgctgacgtcatcgccgtacacgcgtacgtgggaggacaggtaggtactagtacgtactagcagagcagtgtgtgggccccacatgacagtacgtgacaggtcatcgtgacaattaatgcatgtgtgtgccccattttgggttggtgcccttttgctttgctacttgttgtaggttgctgttcatggatcgatgaacaatagcgtgtgtgtgtgtatgcaatgcatggtgcgctccaagtcgatctccaagatgcgtagtactgtacttcattgcgtgccgtaggaatccaattatcttgttatcttttagcccttttgatcttgttgtcacaaagcatcgatatgtggctgagaaagcaaagtatgtactgtgatctttatgagcaatttgcctataaaaagttgtttttttatataaaaaaaatcctacacacatagtataactatagcttcacggattttcaaatggtgtcattcttgcaaacgcattgtatgattgtatttatgagaagactttcttaaatcatgtttataattttatacgatttgttcgcttgcacactcgaatgatgatcactaataactaagggtaagttttaaatagctacttgaagcgactacatcacaatttcttgatgaatacatttcccaaactgttaagtgatacatttcgtgcaaaagttttttacatataagttaataaatatatttttctaaatttattataattaatactcgactaattaccatatagaaataacttactctctatgtcctaaaatatagcaatcttatactggatgggacaagtgcaaagaatctagacatgagtatgtctagatttattgtactaggatgtgtcctatccagtaaaggttgctatattttgcgacggagggatatcttattttacatgctttcaaaaatctaagctaatcatctgttccgaaccaactaaattttttagccattcggcatgcacaaaagagcgagatgtaagaggcaatagatcatagttccactagaaacatcttaaaatttgagagatcgatcgaaaacgagtacacccatatgcacgggccgaacagccaacttaagcaaattaatgcgccgtgacggtggtggatattcgatcgctaccctctctaccaagttgcatttcattgcatcgcatatggcccatacattcatacatgcaaactatagctagctagatatatatactccatctcaaatataatctcgtgtccacgcgcgtgcgtgtgtactgttcagtaacgcgggagtacggctcttaattttagctaggcaggcaggcaggcacatggccgaccgatcgacatgggacccacccacactgcacactgtcattagagacttgttttagggaatttaagactttgagaaatactcccgcctccctaccaaaatataagagattataggtgattgtgacatatcctaagactataaatctggacagatatcttaggatggacaaatgtcagatccatagtcttggaatatatcacatacccataatcccttatatttagggatgaagggagtagctgttagttagtttctgatcaaaatccgaaaaaatagggtttttatcagcttgtatataactttttaaatgtgaaaaaaatgtattgtttaggggaatttctagttctaagataaagtatagttgtcagaagctcttccgaatagatcctagattgccggtcgatgggtcccaccgaccatccactcacaaactaaaccaaccgatcagaaattaaagccaacaacggtgaccggccggcacgcagctaagctagctagcgtgcgacgacggtggtaaaacagccgttgccggtggtgacttcgatcgccgtttaaagattgttgtttccaggaagctgtgtatgctgctgcattcatctacgacgaagaaccaattctacgtacttctatacatactactatatatactaatcttggctgcaggagtcgttttctacccgcgtagctagtctactttgactcggaaaaatacttaaatttagacttgttgcctatatatatatgtgtgtgtgtgtggcatgcacgcatatatacatcaagctgcctcattttctatatatcagtctttcttgacctggactagccttttgcatgcatcctttttgttataaacacacaatactacaaacacaagcggtatgataacctaatgactgaaccgacatcttttgggattgataaaatcatcacggacaacttactgtcgacgagtatattgctaacactggtggagaaaccatctttcgtcggtcggccgatttccacaatagtcccggatgcaataaaaaccggggctaaagatgatctttagtcccggttcaaaagggtaacgggcatatttgatctttagtcccggtttgtgttaccaaccgggactatctttagtcccggttcgaatgctgtcaggacctgtcaggcccccccgggatctttagtcccggttggtagcaccaaccaggactaaagatcttaactttagtcccggttggtaataccaaccgggactaaagatcccggtgatctttagccccggttggtgctaccaaccgagactaaagatcttaactttagtcccggttggtaataccaaccgggactaatgatcccggtgatctttagccccggttggtgctaccaaccgggactaaagtcccacccctatatatatgtcttcttcctcctccagctgcccgagcaagcttcaaaatttcttcaaaaaagaggggaggtcatgccaaaatttctattgaatttattttggtgattacatacaaatcggaggtgcctaaaaggtttgcaacttcatcctccaatgttttttttgtcatactacatttgcacctatgttttgcacactttttttgtctccaaaatttagttgtaagttgatgagagagaaaatgtgtgtggggaagaaagaatatatagaaatttagttcatttgttaaacaaggttttataaaatagttgagaaggaaaactctagtgaaagttaatattaaataatagaaaacaaactaaaataaaaattaaaagaagtaaaacacattaaaattagtttaaaactttacaaatagtttttaagaattatttggtgtaatattttatgatttttgtatgaataaagatatcttataattattgtatgactgtcattattgtaagaataattatttgtgtgcggtttttttgactcatgtagatggatcggcaatggatgtacgctgaccggcggtccaaagagtttattgacggcgtgcactattttttgagagtggccgaagctaacaggcaaagaggttttatttgttgtccatgcaataagtgtaagaatcagaaggagtattctgcatccaggactattcatttccacttgtttgagtcggggttcatgccaagctataattgttggacatcccacggagagcaaggtgttgaaatggaagaagatgaagtggaagacgacaatattccggactttgctcagtatgttggatttgaaggaaatcaaacgggcgaggaggaaatagctgctgatggtaacgacgttgcggatgatcttggtcagatgttgcaggacgccagggaagactgcgaaagtgaaaaggaggcccataaattggacaagatgttggaggaccacagaacttcgttgtacccaggttgcgagcaggggcacaaaaagttggataccactctggagttgttgcaatggaaggcaaaaaatggggttagtgacaaggcatttggcgatttattgaaactcgtcaagaacattcttccggggggaaacaaattgcccgagacaacgtacgaggctaagaagatagtctgcccgttaggactggaagttcataagattcacgcatgtccgaacgattgtatcctatatcgcggtgaggagtatgagaacctagaagcatgccctgtttgcaaagcactacgatacaagattagacgggacgatccaggagaagttgacgggcagctaacaaagaagagaattcctgctaaggtgatgtggtatttccctataataccacggctaaggcgtttgttcaggaacaaggggaatgctagaatgttgcgatggcacgctgaagagcgtcaacaggacgggatgctgagacaccccgccgatggttcgcagtggcgaaacatcgacagaaaatttaaagaatttggaaaggacgcacgaaacatacggtttggtttgagtacggatggcatgaatccttttggagagatgagcagcggccatagcacttggcccgttacgatgtgtatctacaacctcccccctggctatgcatgaagaggaagtacataatgatgccgattattattcaaggccccaagcaacctggtaacgacatcgacgtgtacctaagaccactggtcgaagatcttaaacagttgtggaagaaggaaggtgtccccgtgtgggacgaggacaaacaggaggagtttaacctacgagcgctgctgttcgtaaccatcaacgattggcctgcacttagcaacctatccggacagtccaacaaggggtacaaggcttgcactcactgtatggatgaaacagaaagtacgtatcttaagcactgtaggaaggttgtatacatgggtcatcatcgattccttgcagcaaaccacccggtacggaagaaaggcaagcacttcgaacataaggccgaccaccgtacgaagcctaaacatcgcagcgggaaaacagtgtttgctatggttaaagatcttaaagtagtgttcggaaaggggcctggaagccagcatatagagagcgaagatggtcatgcggcgatgtggaaaaagaactctatattttgggagttaccatattgggaattcttggacgtacgccacgcaatcgacgtgatgcacctcactaagaacctttgcgtaaaccttcttggcttcctaggtgtatacggaaagtcgaaagatacactggaagcacgtaatgatctgaagcatatggaacaacgcggcgaccttcacccggaaccaaaggagaaaggaagccattacttgagtccagccagctacactcttagcaaggcagagaaggaaagtatgtttgaatgcttggagagcataaaggtaccgtctggatactccacgaatatcaagcgaataataagcacgaagcagaagaagttcacaaacctaaagtctcatgactgtcacgtgttgatgacacaactgctaccagttgtaataaggagtatccttccagacaatgtccgggcaacaataacaaagctatgtgcattcatgaacgcaatttcgcagaaggtcatcgatccggatagattagaagcccttcagaatgaagtggtgcaatatctcgtcagttttgagttgatatttccaccttcatttttcaatataatgacgcatctgctttgtcaccttgtgaaagagatccgtattctcgggcctatgtacctacacaacatgtttcctttcgagaggtacatgggcgttctgaagaagtatgttcgtaaccgtgctcgtccagaggcaagcatcgccaagggttatggaacagaggaggtcatcgaattttgcgtagaatttatcgaagaccttcgcccaatcggggtacctgaatcacgccatgaagggagactacggggaaagggaactctcggaaggaaagcaataatgacggtagacaacaatttattccgtaaagcccatttcactgttctgcaacactcttcattggtaactccttacatcgaggagcacttggctctagttcgcgccaggaacatcggtaagtccgatgcatggattacacggcatcacattgatactttccccgcgtggctacgacaacatctcatgggtaacgagtcgatcaaccaacaacttgccttcctggcgaggggaccgtctgggtctatcgcgacattccagggatatgagatcaatgggtacacattctacacgagagcccaagacatgaagagcacgaaccaaaacagcgctgttcgtgtcgatgccatgggacacgatggaacaactgccacgtattacggtgccatcgaggacatatgggaacttgactatggtcctctcaaggttcctctgttccggtgccaatgggttaggttgactggtggaggcgtaatgattgatgacagtgggatgacaactgttgaccttaacaaggttggatactcggacgaaccttttgtccttgccaatgatgtaacgcaagtctttttcgtgaaggacatgtctagcaaaggaaagaagggcagagggcctgatgagcctaagcgtcaagtggttctcccaggcaaaagaaaaatcgtcggagttgaggacaagactgacgaggattacgatcagttggatgggcaaccccctttcacggtgacgattgaccctagcatcctcctatcaaatgaagacaccccttactcacgcagcgatcacaaggagggaacaatagtgaggagaaagtacgtgcggtcaaccgtcaccgccgatgtaatgccgtaattattgtgtacacgatgtaaactattttggatgtattgattatccatataaatcaattgatgtatggcatttgttaattacgcacgattattagaggtttcaacaagtttaaatcatgtatatgttagttatatgtgatacttacaatttttaaaagttttaaatcacacaggtggcaatttcatatgtatgttaattagagtttttaacatttaatttactagcattcatatgctaattataattgactagaggatttttaaaagttttaaatcacgcaagtggcaatttcatatgttaattagagtttttaacatttaatttactatcattcatatgctaattataattgactggagaatttttaaaagtattaaatttaatatatttttaaaactatcattcatatattagagtttttcacaatttaatttactatctttcatatgctacttatatatgactattcgaatttttaaaaggtttaaatcatgcatgtggcatttacatatatgaattagagtttttagcatttaatttaatataattcctacgctaagtacatatgatgattacaatttttattaattttaaatcatgcagtatgtacattaatatcttaattagagtttttaccaatataataatatcattcatatatatgctaagaatatatatatattggaatttttattaattataagtcatatatttgcttattacgatttatccacttaatttattacagccaaaaataatttttcgaagtaattgtcattaatctttgtactttaaataatgttaatgcattaacttctattttataaacacatatgtaagcgaaaatcatatgcagtgctataatctttagtcccggttcttaaccctaaccgggtttaaaaagaatttcgaaatagcgggaaaagatatttactcccggttgttgagaacaaccgggactaaagatatctttagtcccggttgttgagaacaaccggaagtaaatatcttttctttactcccggttgttctcaacaaccgggagtaaagatccaggggtatatatattcccggtgcgccctcgtcttcttcaccaacacttaaacgttttcggccgatcgatctctctcggcctctctccttcgccgccactgcctagggcaaatccccgcgccgacgccgccgtatctcgccgtcgtctcgagctcgtcgtcctcgccgccgcctccgcctcctccgctgccgctgcatctctggggtgagagccgccgccgccagatctcccttcatgcagctcgatctctccgatctcgatctctctccgtcgcgccgcccgccacgagacgccgcgccacgacgacgacacgccacgccgccgccttcgacgccgcgcaacgccgccgccgcatgccaacgccacgccgccgccgccgtcgccacgccgccgccgccttcgccgccgcgcgcgcaatgccgccgccgccacgccacgccgccgccgccacgccacgccacgccaccgccgccacggccccacaacgccacgccgccgccgccgtcgccacgccgccgcgccaaccgccgccccaatgccgccacaccgccgttaacgaacgagaacgagaacgatcgaacgaacgagagcgagaacgaacacgtcaacgtacgttgccgcgacaacgtgaacgagaacgagaacgatcgaacgaacgagagcgagaacgagaacgatcgaacgaagacaagcaagaacgagggaacgaacgtgaatgagaacaaacgaacgaacgtgaatgagaacgagcgaacgaacgtgaacgagctagggaacgtgaacgagcgaacgaacgaggacgaacgttaacgtgaaatgcaatatatatatatatatatatatatatatatatatatatatatatatatatatatatatatatatatatatatatatatatatgtatatatatatatatgtatatatatatgtatatatatgtatatatgtatgtatatatatatgttacttcgcatttatcctaatacatttttttgtatcttgcagaaaagacgtgttgtcggagtcgtccgtcaagcctgagtggaagagctagccctagaaggaattggagcaggcaagtgacgtaataatataaatgattgttatatttgtaatgcaattaattaagattattagacctgtaattagacttatcatataagattgtgtagtgttctaatattatttgagttttaatataagattattttattgcaaattagacttagtatgacattattgactacggaattggtgcgactcctagcaattgactattgtagtcttaattagacttagcatatacgcacgaaacacttagcatacattactattttagtcttagcatgtaatattatttgagttttaatataatattactttatttgtaattagacttggtatgtaattattgactacggaattggtgcgacaagtagcaattgactattgtagtcttaattagacttagcatatacgcacgaaacacttagcatatacatgactattttagtcttagcatgtaatattatttgagttttaatataagattattttatttgtaattagatttagtatataattatttactagctagggttgtataatatacgtcacatagacttagcttatatcacgatttgtaattagacttagcacgtaaggttgtgtagggttctaatgtacgacatttacacttagcatacatgacttagattgttaaaacataaatgtctcgtgacttagcagatgtttcttgtatcaacagatggctgaccgcgatgaggaacagatattgtacgatacaatcgcggagggaagcagccagtactggaatgaagaagaggggaacgaggatccaaaccagtacttgaacgaggaagggaacgtggagagggatgcggaggggaaccagcaggggcacgtggaaagggatgtggaggggaaccaggaggaggaggctagtggtagtcaaccctccgttggacagaagagggcacgcgggcaacgaggtgcagcgaagaagcttgagggtcggcacatcataacggaagtggaagaagatggacgtcctagtgccccggccgaagccgccaagaactatgtacgtcacagcggttgggttgtgcgggataacgtgcctgtcagtacggtgtactggcgaagaacaagggcacgcggagatcatgagagctttgtcccagattcggagaaagagatgctgtggaccacaatgctcgagacattcacccttcctgcgggtacagaggacaaagtgaaaaggtggactctgaagaaaatggcagaacagtttcagagcttcaagggagatctgtaccagaagtatatactgaaggggcagacaccgaacttcgacacattcccaaagctaagggatcactaggacgagttcgttgcatataagacaggtgaacaagggaaggcgatgatggaaagaaacaaagaaaatgccgccaagaagaagtaccatcaccacttggggtcaggaggctatagcgtcgcgatgccgaagtgggagcagatggaggctagcttgattgagaggggtatcgaaccggcaacagccaattggccggaacgatcgaagttctggtactatgctcacggtggaacgctcaacccagctgatggctcactggtcttcggctatcagatacaagaggctgcgcgacgactaacagatgcagtggaagcctcctctcagggcacgttccaaccagacagagatagggacgagctgacactcgccctgcagactccagagcatccaggacgaactcgagggaaaggggtgattccttggaagattggtttcaaggaggacatccacacgtacaggagtcggatgaggagcaagagagataccgaggcgaagattgcagacctagagttccgggtatcgagctacgaactcaacatgcaagaggaggtggcaaggaaggttgatgaacacatggccgcacatcggtcccatgatccccagccgaccattcctcctgcaatggtgagcccgtcaggaaaccgtagcagctgcgcctcaacggggcaggtaggatcacagagcatggacgccatgcaaacacaggacgaatcgacctgtcccgttgatgacatcactcagcggacaccatgtgagctgcatattcctttcaagaacttatcaatgaaggtaagatttagccattccgctagttgctgcttatatatgttgattactaataaataatctctcacaacatgaaggtggcgtcgggcatggccatcccaacggacccttcaggtacttaccactgcaggccgattccagcaggatactccaaggtcgaagttgagttggtcgaaggcgcgtacgaggacctcgagctggattaccctggaggagacggtgagacgcatctacgagacacatgccatgccattattctatggcgcaggcggtacatcatcctccctgggcgacaagcggcgtctcgtgcaccatctcctccggctccgccatctcctcctcaggatcctgcaccgtctcctcctcatgctccgccagcaccgtctccaccgcaggctccagcatcgactcctcctcaggatcctgcaccgactcctcctcgtgctcctacacctactcccccgcaagctcctcttccggcaccttcaaagtcaagggcccccccagctccaccgcttgcccacacaagggcaacaaagaaggcgaaagttgacgccgccaagaacaaggacccggggtacgattacacgcaagaggagcttgacgcttacgttgcatcagaagtcaagagacaattcaagcctcgaagtccagaaaagaagattcctatagaccccagtgtcaggaacttcttcaggggtatgtctgcatctgtcaaggaggccatcaagctatcggactatgagcgaacgctgaagaaagcatcttctggaaagtccaaaccagtccctcaacttggagggcaaccaaaccaggagatcgagccgttggtgaccggtaaagaaatgacgatagaacaatttattactgacaccggtctaactacggatcaattgctaggagtcgcaccaatcgaaaaggcggaagtgaaatacatgtatgaactcggtaaaccgcttgtcaagcctgagctgctgcagtccctacccacacaaatgtacaagttccatcagctgtacatggagatgagcgccaccggtagagagatgatcggagcgaggatcagggacacggacttcttgcaaggagatgacattctctggatcaatttcaggggaatctacgaactataccagctggacaccctcgacgtctctattatgagttgctggattttgtaagtatatcgttcagttagatttcttactatacgtctcctttaattaattaggtccttgtatataagtagaccatagaaaataatatactcccttttatcgttgtagaatggagattcaaagggcccgacggcggagggttttcgatactggattcatcgaccctcggaaagtaaacgtcgcaatgctcgaccaatatccacaagaaacagaggacaatctcgtccatctcctgaaggcgcagcattacaagacgttcaaactgttgccatacaacacagagttagtttaattttactgtcttcctacataccaaatttcattcccgtacgaacttgctaagtgtttcatatgtaatgcatcccacgcacattgcagattccactgggtgcttttactcatcgacctggaggcctgcaccatcaacgtatatgactcaatggataaaaaagagtctacgtttgacaaggttttcgaacttatagacaggtaccgtcataagttcctttgttaattaagaaaatcttgttatgttaattgctactacgaatcatagctttaaactccatgtagggcttggtatcggttccgtcatttggtccgcggcaaatggagagaaagacttaggcggaagttcaaatttcctgtgagtacacatgctctacatttatatttctccgattcaaatacatacaagtgtatattaattagatctctcgttgtttgtcatttatttgtagtgcgcaaagcaaaagcagggaactaacttgtgcggctattacgtgtgcgagtattgccactgccttgcagaccaaatcatcaccacaagagagctcgatgtacgtacaaataaattcaaaatttcattacgtagcgatttcttgtttaattactaatcaatttcatacattcatatagtttattcgcatgagggataacctgaccacacacaaggaatttatcgcggcggttcaagaacaactcatgggattcatcaacgaagaaatccttgatcccaagggtgaattctactacgacggaaacacaattcaccggtccttagcttctgagctagcagcgagtactactacgtcgaaatcatagctagctaggacatataatggattgtaattaatacatgactacatatgtttctatatgcatgtgtacacattttctataatgtaaatatattttgttcatatatatatctatatacatatgcatttgcataacatatatatgtataaatacatatatatatgtatgcatatatatgtattgaaacatatatatgcatggtttatatatgtatatatatatatatatatgtatatatatatatatatatatatatatatatatatgtatatatatatatatatatatatatatatatatatatatatatatatatgtaaaccatgcagcaacaggggcatgcaaaaaaaaaaggtcagctctatctttagtcccggttggtaacaccaaccgggactaaagatcgatctttactcccggttatttcacccgggactaaagatagcgatctttagtcccggattggtactcccggtttggaaaccgggactaaaggggggttacgaaccgggactacaaagggtttctccaccagtgtaatcactaaaaataattagccgtaattgagagcactcatactaagtggttaatgttgaacttggatgtgcaggttccatccctagaaacctaatatgttgggctacgttcactctgtcttttgtatgtgttatggtgaaccaattggccgcatatgaacgtgggggtgagattggttgcaacttgatatactgaaacaaatgctagatgtaccgactatctaaaaacttctacatgcatgtgtgggaggttcaggcaagctcgtgcatattagggcccgttctttaattcctactattatggtagcaaaattattgtgagcatgttttctaagctactaaacgatacaatttgttataaaatatttcttcatcaacatttgttataatagttatttaattcatttgtgcctaaataactatgcatgataagctctagttctcccaccatccataatctatcagtgatggctctttagcacaaatatatatacatatccctcgtgaccacgatcgatgatcgacaatacgatttagacactgcttaattgcgcaggttgtcccccggacgctgaaataatttcagccacaccaatttaatgatggcataattaaaaggagtatatgtgaatatgtgacaaacactcctacttcaattaatcctccagtcatgaccgtgcatatactttttcctggtttatcgcttagaaaagaagacagccagaactcgagccaaaagatcttcaggctcagggcaacgtacacgtacactattgtacgtgcaggtacaagtagatatatgtgacttgctagctaggacaagtagctattagtattaataaactttcaatgtctcctactaattcatacatacgtggaaggaccaccaatccactattcacctcttcccataatataaaggattttaggtaaatgtgacacatcctagtacagtgaatatggacggaccgtctatccaaattcaatgtaatgggatgtgtcatatccacccaaaatcccttatattatgagacggagcgagtatatgtttgggcatcgatcgagcaatataactatccatcaattatttatatggagatggtgatcgagaagtaatagctacacgtatattatctggttttttctcggttgtggtaccaccagcgtatttaactctagaaaaaaaaatataggatatgtgatattactcggtttctcacagcttcataaaatcaattccctatgaaccacaaaaaattttacaacatccaggacttcatactacacacacgtaacgtatagaaaatcaagcagaataacgagaagtccagatgagagacgaaaaaaaatcgccagttcagcccatcacaccaacaaaaaaaatattcgaggcatttacaaatttgccatcagtttttttaatattattaggataccactcggatgacagttctagtggcatttttataattttagtgacaatattgcaataacgattcaaagtagtggcaaatttgcaattgcccaaaaatattctttttgaaaagtaatactctctccatattttaatgtattacgccgttgactttttaatcaacgtttgaccattcgtcttattaaaaaaaattatgtaattatcatttattttattgtggcttgatttatcatcaaatattttttaagtatgacataaatatttttatatttgcacagaaaatttgaataaaacgaatggtcaaacattgttcgaaaaagttaacggtgtcatacagggagttctaggacgtaggagtaataaacaaacaaaggaaaaggaaaattgatttaggggctgtttggtttccagggacttattccaagtccctgtcacatcggatgtttgacactaatttggagtattaaacatatactaattacaaaacccattccataagctttgactaattcgcgagacgaatcttttgagtctaattacgccatgattttgacaatgtgatgctacagtaaacttttgataattatggattaattaggcttaaaaaaatcgtctcgcggattagctctcatttatgaaattaatttttttattagtctatgtttaatactctaaattagcgtccaaacatccgatgtgacatgggctaaaaagttttagtaccatctaaacacccccttagtagcagcactgtagcagcatttccatcggtacggaattccgaggtggggcccgcccatcccccgcagttgcagcgggtgtcgctgtcacgagccagctcgtcccccgcgtccccgctgtcccggtcgccatcggtcggttcgctggcccgccccccagccgtaccgtacgagccggactacggaatcggcacggcaaaccagggcggctcacgctcgcatcgaccggaccagacaccacaccaaccggtcgggctcgggcgccgcgccgcgccggccaaggcgaccgggtttagtaaaaggcgtgtggtgtggtgtggtcacgacgcgatgggatggggggtccgggtcgccaccggctttgtgtcgccctgtacctgccgggtacactattcggtaccagcttgtaccctaccctctcgcccctgcccttatctgctagcctcacacctacgtggtgccaaccattttgttgtgccggtgaaattaggtacttcttcttcttcttcttcttcttcttcttcttcttcttcttcttctttccctccgcggttatatagacgacgtgcatgcatcagatggtcatgagtgtgtgacacaccgacgcgcgctcatataattatccggtaaaaaaattcatgtgtaacacacgtgcacttaaaggattatccggtggaaaattcatgtgtactgatgtgtagaagtagcattatgtatgcaaatagaccgttatcgtagtttttccctcttcgtgaataatgtcagacctatatattagaaacaacaaagttggactcttaactattatatctttcaatgcacaatgccgaaatgttttctattttgtacatagttatacagaagacgcgcatgcatcgtgccgtgagaaggaaacacccgctagcaaattcacgtgtactaatgggtaggagtagtgttatgtagtagtattaaatgatcctataaattaccatattattgtgtgttttgcacgagtgagtataaataaataaatatgaatatgaatggtttgacataaagcatgagagcagtccgaatatatacgaattaattatatagtatgcctacaatagatggttatcatggtttgttgccatctactacgaataatgttagatctatattagaaacggcaatagtctcaaccattgggatcttaaccattatatccctaaacgcacaacttcaaactatcgtgcattgttgttgcacaatttcaaattgtcacgcatcgtaagaatcttgggtgtaaggcttacttatactttgtgctattcaatggaacttatgtatatagacctttttttatcagcaacattttattgtacatatagagaagatgtcaccctatctgtcacaaaataaatttactttcacccatcccacaagcaccaataagaaaaggactgcaacactccctcccacccaatttttcaaatctcaatacaattattcctcccttatttactctcattacatttatatctttcttttataaactccgatgcaccaatgctaaaaataataaattaattttaagataaatgagatgaactaaaaaaatacttattatactaggatgcaaggcataaaatattactccacattgcaaaatggaatcagtaattaactagaaataaattaatactcctaccctccaacttctaaagtggagcaaccactaaacccccacagcatttatataagcccacaccccccctacccttgttgtaccgaccgcaaaccgcaacaaagctcacgcctttgcctccccaaacaacccacctttcgcttcatcctcctcctcgccgccggcgagctcagccatgaaggccaagcgcctcctcaagcggctctcccgcgtcgccgacgactcccccgccgccgcggcgtaccagcagctccggccgaagcaggcggcggcggcggcggcgggggggaaggtgccgcaggggcacgtgccggtgtgcgtcggcgaggagggcgggccggtggagaggttcgcggtgagggcggagctcctcgggagcccggcgttcgcggcgctgctccggcgggcggcgcaggagtacgggtacggccaccccggcgcgctccgcatcccctgccccgtcgccgacttccgccgcctcctcctccgcctctccgccgccgccgccgccgccgccgacgaaggcgaatacccctcctcctacgactgctagctcgccgccggcgagacccgcggcgccgccctcttcttggccggggcgcattttacgctcttctgccactggaggcgtgtggccacaccattttaccattttacccctgggtaggattagagtgtacatacagggattgtgagctgctggtgatctgattgattgcagatgatggagggcaggattgggatttgggtactagatttttcacctacagatttgtgatttcttttatttactatttgttactactagcagtagtattatctactactagctgctgatggatgggaagaactatgggtgttcatttttttcttacccccttgtagttctaggatttgcagtagtttgtgagagggaggattttgtggtgttcagcattaaccatacatgtaatccttgaggctagtttgatgccattttattatatggaggtagtagtaatttttactagagcacaatgttgttgtgtttctttaattccctcactcttcctgtttactttatctgttgttctataagatctaattaagaaaagaagtataataatctttctcccaattaagagaacaacgcaaaagattcacatgattttttttgtgaacatcacggattatctggattttgactaaattttggtgacccaggcattgaattttatgtccttatctaagtaggagtactaaatgttttcttgcaatgcattttgggggcacaaagcaacactagtgcaagcaagctgtgatgccctgagatatttggtggtccggcctaagatggcaaaccaacctactgattgaagcagaatctgctaaagaaagcagggcattctgctccctttgcaaccgtaccactgcctttttattacaaatttataatcagcgccgacatattttctgaaaaaaaatcttcacaaccggttgtcaaacaagttttttttttttcaatttgaaattctctcgatagaaaatttaagttataaatactcaaatattgcaacatttggattgcactccgcatgtaaaaacctgactaatctgtactcagccaaaatcccttatattttgacgcggagcctaaaagactctgcatgtggaaattatggatggaaagattgttcagcctaataaagcaagagttttcgttatttcgttttcatgtcgagaagaaaaaggtccagatttccattggatggatgctaatgtttgtttgcatgttgagatatatggccaggacaggggcagggcaggaaggaagcatcctgaagaacttcaggtcttgtcttggtacgacccttaactgatcgtcaggctgtcatgagaaggacggctttggtttggcacagctgaaaaagagaaggggagatgagacagccatggctgatgacttggctgttcatttctcctgttcactctttaagctaggaaacattggtatcaaatcgtcttcagcgaaggcgataagttgaccgcggcgaaatcgcttgatgcatgacatgttgcactgttgcagtgtctcctcagtattttgcttgatctgaagggaagatttcggggagaaaatcggtactgatattttacttgaaatttcaggaaagatatgtgttttcctaggagaaaatgaagccacaaatgcatttgagtcatattatgctgttgtttctctcttgtaatgcagctgtcaaagttgacactttcaccaaatcaaagatatggttttttacagtttctctgtggatgcttccatgaaatttctgaatccaatgttttgtaccaccatataaatagaaactgtggtttaattcatgttttgcaatagaagaagcagcatccccatgtgcagagagattgactagtactacaattgacaataactacttaactgtgacttagctcagagggaagaagattcagaagagatccaacctacttatacacctaaagcaaccaatcttgcattattgttatcagcatcatggtgccctctttcctaatcattgtgacagagccaattctaaactgtttctgaatctcctcacctcaaaagaaagagagaagaaactgtttctgaatctcctgctcaaataaatcaagcaagccataacaaccacctgaaaaataaaacaggtaggttccaaatgcatcatcatgctacaatttcctaggtttcagcatgtgaggggagaacagaagtggaggcaaacaatgaataccaccaatttccctgctcatttaagtgctccctgatatgatgatatatcacagatacacactccatcagtcacatgcatgatgcagagcaaagagatacagaagcaggtacacacagctccttttcggttttgccattgtggaaaaagactagtctccatttgcagcacatggtgagcaccaggaagtttctctctttctcccctagttcacctccagccttttgcaagcaagtgcagtgcagcaaatggagccatggcaaaaatagtggtagcagcaaactagcaatgcactgatgcagaagtgcagatgcacagatgggaagggcaagtgcagtgcagcaaatttagccatggcaaaaatagtggtactgcacctactaaatttgtaactgaaattcttgtgtgtgtttttttctggttgcaagagatgatcatgtgagcagtgcagaagagggcacaatgaattagagaagagggtaggcaaaggtagcccatacggtcaaattgccaaaggcaggcaggcacatgatggggttcagacttcagagggggtctcaggccggtctctcctagtgtaaatttccagtggtcgaggggcaccacatggcacgccgcatatgcaatgcaatgccaaagcgtcgtttgctgacacagggcacgacacgctcggagcgcgacgtcgccggtgcgtccactgttcgggacgccggcggcgtggcctcgtcttgcggcgacaggcgaagttcacggtggatggccggccggggcgacaagagagagacatgggacatggctgctcagtgctctttagctgaaatcatgtggttctcgtcggcagggtttcctttgccgtcggtaaccctgcgcggttaccacgggtacggtaatataaataccacagtaacctccttaaattcaaataaacttaaaaaataatttgaatatttaacaaattttgcatggttttatattgttaccacgcgataaacatgcttaccgccagccgaggtgcgatatccccagccccgacggtttcccggtcgacgactcgtcgttcaggtcacgatggttttgatatgtagggcagtatgtttgagcttggagcgtcatgcgaagcatgtggcctgacgtcagcttacaagggccaaggttggaaggtacagagatgaacattgaaatacaacatttttatgaaaaaaaatacaaaatcgatcaagttaaaaattgatcgtttttaattcgattttcaagtttttaattttcaatatcacgcttgaaccaaacttggaaaaggacggcgtctagagattggaagaattactagtaccacgcaatgaaaaaatacgcacaagacggctaaaatataatccaactttactgaatctagtgaattgccgccatactttgtacaagacaaaaaaaaaaagtctagcttccaaccagccatttgtgttcgcaaattttcaaaccacctcttagtctcagctgtatcgttcagtgtttcggactagctccaccagaaaaatatagggcaatgctgggttgaatcttcacctcagaataggcagtggcacatataccaagtcggctccaactattttctaccatatacaaaaagatcagctcttactcgctgcgcaccgagttgtacttgtcagcaagcggaggtgaggccattatcttgttcatcagattcttgaacctcatgctgtaatcattaccactgcagacgtaacccaaaagatcaaaacaaggtaagatactcaaattagaatgcagatgtcactttcgaacaaacatatggcatgtatagaatggctgtatcgcaagtaaaatgaggtaaccatttgtttctagttatcgcttatcaagggcaaagaataaagatgtggcgattcactaataacgagaaagatgacagcacagttaaaagtgtggttaaaccagaaaaaaagtgttcggggcaggacagaatgatgcctgaccttatgcggcttagagcagcgattgctcgaagagcacttcgaatcatgtcttcattgcgatcaacctcttgcttcactgcatcgcccttgggtttgtgatttatagttttctcaatggggtcaactaatgagtccaaaactgagacagcatagtaagaatattagcaaaaagaactcagagtagggcatttgcatcgtatgaaacatccccgtaaggacctagattaaggcaacaaacctgccagaacagcagaagggcacttgtctgctagctttgagagaatcagatggcaaggcatttttacatcataatgatctacaaagtggttccataagacaacaaaaaagcagttattacagcgtgtgtatactaagcataaacaagaagatacgaatactagtgaaaaaagcactgcgaacaagtaaacaaaataaacatgacttatttgtgtgcggtgtaaaggttttaaagattacacaccacctatacatctatattactacagtggattaaacggaatgttcggtcaaagtgataaattatttagtgtaacagtacttaccacctaaaccagataagaggaaaggaacgataaatgatgatgggttcacttgatcaagacagctatccagcaatgtatccacacattcaaaggcagctttcctgagttcaagaccatcgtccacaacatgcttgaaaggcccaaggtcaactgttctgatcaattcttgctgcacaggaaaaaatcattacgataagatggatacaaaaaacattacttgatataacagtcctagctcacaacaaaacaagaagtcaataagaaactataccttaacaacagtttggtcatacaaaagaggcaataattcaggaagaagacccttaatcaaatttggcttgttgtgggcagctgtactcaaggccagcacagctgcacgcctcacgtgctgcaaagtgcaaaaggaaacaatgaacaccacatctagacagcattaagtaaaaacgctgaactgtgcttaatttccataccctgtcactgtctttaatcaacatcaggaaggtagaaatctcggagtacataatttcatctatttttccaggccgttcaacaattgaatattttatagcaatggcaactgtagctcttgtgtttgcagcaggactagatgtgcgttcctacaaaaaaaaacgcaaggaatgaaccaaaagacctctaatcattaaatgacagtagaacaaaatgaagaaaatagtttagatagtaatcccatttcacctttagagcagggattaatttcctaggttcaatcagagcaattttgcctaagcattctgcaactacattccgaactccttcctcctcactttcacagtgattaaagagcaatgccaaaatcttctcaatgtttgaatcctggagctcactctggccagtatggtcaacagactgccgtgcaattacctgagtgatttaaagtacaagcaagaattaagcaacaaatacatggagaatgcacatcaaaccaaatcctaatggggacaaacctctttcagtgaatgaagcaatagatactgtttcttctgttggttgtcaatctgattcaagataaaaggcaaatacttcgataaatttccaacagcaatgtttccgagagcatatgacgctgcagatttgatctcctcaaaaggtgactgaaatgactcaatgacaatattctcaatttgagcatgattgctgaggtccttccttcttccaatttctcccaaacataacaaggccatgtgctgtttagcctggtaaacaaagataggcagtcagctgaatacaaggagaatgatagagatcatatttgagttatttgaattcatgcaattaataaataactaatacttcaatggcaattttcatggatcagaatcaaacaagcacatcaacagttaccaaggactttcagactatacaatttagggtgatcctatcaaattgaaaaaaataaagcatgatccctccaattcagcatagtcatttttcaaaattgtcgaaggcataggaaactagttaagagagaatgtagtatcctatttcacaacgctatagagttataacattatctacatataaaagatgttgatatatgaaaatctatataactaacttaaaaggatcaccaagatatggcatgcactataccaaagagcagaagtactacataaaagtgaaacagtacagaagttaaacaacacatctgtcatcaagaatgcgccttacagaattagtagtgctgtcatcttttaaaatgcctttaagcatttcaatagttgaggcacacttctgatccccagctgctaagcacaacacagcaacacactgtgcaatggaagacaatgcttgtttggcaagtccacctgactgcgatggtttagcagtagaaataagagaatccaacaaagtgtcaaagcttgtatttgcagactggaccagtgaagcaaaaaatctctgcagtgcctgtggcagtaacatcccatgttagtgtcaacatgcaacttaagaagaaatcaaatatgtaaatgaaaaaaaaaatacctgtagtgcctgcccttgcaagagagcactcctgatcaaaataagggcctggggcaaaaccttgtacctcactgcaagaccaacattttggatggattttctatcgaccatgatcgtgcaacaaagttccagcgcaagagcagtcatgtgcaaatccatgtcactgccacagtaaatcaggtcagcaccagtcgtcatggtagccagaaaatgcaggattgatgaataacaacaaacctaatgagcgtagaaagttcagcaataatagtttcataagaggatccaatttgaccaccatacgcaacaacaagagaatttagtgttcccaatgtagcctgccttagagctctgtttgcctgttgaaataaatgtgcatcaaataaaacttagcgaacaagtttcataactgttatttaaaaagttttcccatgaatcgtgacaaaacaaagtaaacactgggtatacctttcgaaggaaagccgtgagctcagaaatgacatggtctaggacacacgaaagatcaatgcgaagaggtgatttagcaatcactgcaaacgcctgtaaaggggaaaaacattttatgtaccgagcagatcaacaaaacaaataggcactcgattgaaaaaatcaggcaaatatagaaaaaagaacttctaatttcaaatgtaggcattaagcaagtgataataggttatatcattaaaattctgaggaaatgatctgagcaaatagattggtaaaatacgtttcaactaagtttgcatcacaatggaccaactacaacacaatttctctttcaggcaatctagtgagatgtgaaaccagcacttatcaaaacactcgtagttcctttaacatcattgaccagaatattgagatacgcttgggggtatgggtttagttaactattctttcctactaaaatcttcaaactgagactaaaacaaaattgtgttccataaaacaagtcaattaagactaaaatataattgtgttaaagaaaacaagtagtgctcataagtaatgaatcaataaggagattaagcaatcctatctgtcagtaaaggtgcagtcgatagcttaccttaactgctgtaagtctagttatttcattacccattctatcaacaagaatgggaaggcatgccggcagttccctttggagaccatcaccaaacgtgaataccacaaggctcatgcaagatatggcacactctttaacttcctgaaacaaatatttccataagagacctgagagagaaagagacagatgaagatagggaggtgttaattttgctcaacctgatcctgatcctgatttgccaagcgggccaagatagccttatagattggaccaatatatggcctgtaatctagagtgcgtgcctgtatcacaaacaaacaaaggcttcaagaaacagaacttagattttgttcagcaacatatgaaatacaagattgacctcaaaatttggacgaagtacacgaactagctctccgcagactcttaaagcctcagcggtgactttgtaatatctgtctccaatagcagacaatattgggccagaaagggcctggaatttcactacgatcaatacaatgatgacaaatgccataagtatattttactgaagatatacgctacagttacctgtatgtatggatgaaacacagctggggaatgtgaagccataacaagtcttgtaaatacaagggcttcaatcttcaggttggaggtagatgacttatcctatgaaaaagaaaacaagttagcaacaagtagaagtcctgcacataatattttaagcaaaatgggaatcaccaacattcaaagccttctcaatcccaggaacaagtgacccaatatgatcagcaagacagtctggcagtacaacaacaagctccttcaatacagagaatgctccaacctgaaattttatctaaaatcagaaccaggtcgatagacatgatttgcagtcaaagagctcacctttgtcttgattgatttttcacgcaactgcctattgatggatttgacaaccttaggtacttcttgtttcagcaaccatctagggctgaaaagcaaaaggattgccaacatgggctcagtgctctaaacatggtaggatcaacttcaagcatgtaaaagtatttcaccaataaactgcataagatgctataacttggagaagttgaaaataatgatgcacataagagcacaatagacttgcctagactcatcaatgtcaccttgtccttttgtcatgttaccagtttggcgtaacaactcaataaatgtgttaaagatgtccatctagaatcatatagaagcttcatcagattgacaaacagaaagaaaactcagagactgacaaattattgatacaaagcaattacctttacattttcctctctttccctaaaccgttcgattaactttggacaagcctgcatattttttaaaaaagaaaaacatcgaagttaaatgggacactcattattagctaatgggtcacattactaactggtaaaaatcattacagaaacactatccgaaacatgggagaaatttaaacatgccatcaaacagaacatttttcagatgatcatatgttggtttaacatgattatgtcaatatacctccagatacatcttagacaacatttcaggacgagatactataattgcagataagcactttgctgaagccctccggactttccagcttgcatcctcatcatctgtgtattcatttgcgctctcactggagaaaatatcgaaaacatattttgatcaagtaaacagatgctatttatctattactgtaagagcatcaattacgtactcatcatcttcctcatcctgagcctcatcatcagtgtcctcctccatgctatcagtgaaatttggatcatagcttatatattccaatgcaagatttaaaataccctcacaatatggagatatatctcttggacacctcagcataaaactctcgagggcctacattatggaaaaacccacaggagtcatacaagagaacactcgtttcatgtaacattggaaagaagaaaattgttcacctgcaagctgtattcacggagctcttcatcattttccgatgcacttgtacaatagtttatgagcaaaggaacagcttcagcaaggtgtggcccaaaacggtatccaaccgagcgactgtaaatgaaaataatattgaatcaaaacttggattgccgcacaccagataagaaccactaaatcgccaaaaaatagtaaatatctggatttcaactggctagataagtttgaagcgtgaacatgatttcatctaagctattgcgaacaaatgagtgtgccctgttccttaaaagaactactcaaggcatacatgtacagttgaaagccaaagtatataccttagagcgccaatcatctggatatttgttcgggcaatttcagactttgcacttctatttttaagcaactggacaacctcaaaagttgccttggctaataaatcatcagacagacatgcagcaagtgatgctgaagaaaaatagcatgttaacagtcagtgtaaacacctttacaaattcaagccacccaaaaaaccaacatataacagcacagcacatcagttcgacttaccaatgcaagaaatagactttttcctaacacttgcttggttagagctcaactgggataacaaggcagtgagcatactatcatgatcttttgtgatcaagttgccaaatctatgaagtacatcccccaatatatcaaggcactcgcatttcacttccgcactttttccctgtcaacaaaagaagagttatcaaacctacccaagacatcccatggtatgacaaaaccaagtatatgctactaagccccaaaatccatatattggtttatctattataggcaggtgttaaacatgatgtgctggcaaaggcaattcaataaaccgctcttgtttttttaaggtaaagacgcataggtgaaagctaatgtgttcttatagttatgtggatagctagaaattgacagataaaacctcatggactgtgcatggtcagcatcattgccagatttgcagctaaaatctatcatgtgttaggaagggtagcacagtttcctaattaatttatccaaagaaaagattgctcatggtttatcatttgcattgtatttgctgcagtagctaaaattgcggtttgaaatttatggtggctagaaaaatctaaaaatattgactggtctggaaaactatccaactttctgcagtagcggaaggtactgtaccatggcacttactatcatggctctcaaactaaaaacaaatgttaaaacacaatttctttttggctctctgtgctgctaacataattctgaagttgtgaagccagcatataatgacttcaattgaatatggcaagcaaacatggctgaacacctaaccagactggatgaatagggaggtaaaaataaatacatagttacaaggtttgcaaatgtgttctttggtatacctcaaaagtataatgcaccatcagaaacgctgtaaacttaattagcaggctgaaactttcaattgtaatcactgttatcaagtcgcccgactaatcgtgattagtcatagattagtcgtaaagtcagtcaagctagtcgactaaagagccacgactcgaccaaacagcaagtcgtgcgattagtcgtggtaagtcgtggttagtcgtagattagtcataaagtcggtcgtaaattagtcgtgattagtcgtagcaaatcaccaattcaccatgctaattggcttattgtgtttagtactttagttttatttcttgttgacctattgtcttgctttgctactccatagtccatagtttatactccatacatttcttagcacagtataatagtagtaaagattatatattgcatcccctgttttttgcatgaccaagtcatggactagtcgaccaagtcggtccaggggtacctcgactcgactttacgacttgacaaccattattgtaatagcaaatacaaactatatggttcgaatggcacccgccgcaagattaatatggaagcatgttttaccacaattaggagacgaattgagaacttacagcagtggcgcccttgattagctgtggggcaagagacaccaaaatcttttcagcaagtgatgttgtcgtaacttccacaatgattgtcttcagagcaatactagcagtgtctcgatgttggtcctttccattgagtaacttatcacaaagaatgttggtcatctccaccaccctatcctcaccaaccttcttgacaagtggagccaagctaaccaagagaagtaataatacagattaacatagcaaaccatgaagtgcagaacaccggaatgtggaaaacataacagaacaattgggtatcaaattgctatactaaatgtgcttcaatggatgcaataattgaggcatgaagttgcagtgaaaaaaacagcagttagagatatatacagaaaaaaaaaacatctactgtaataatcaatgccctatattagtccagaaaattgaatgaggcagtacaaatccttaacaatagcaactgcaactaacataaattacaaaagtagcgagatccaaatgacagtgatttcttgcaataaggagcggatgatcaccattaacaaaacaaaatgctaatcagacgataccgctctcaataaagggagaaagcaattaatgcataccatttaacagctaaaccagagacatctcctgaagcatcttccagttgttgaagaacggtagtagtcaactttggctcgatgtcttggtcagctttgaagccctctttgttcaattcgctaagcaaatctgaagttgccatatatctgtagtccttatctttccctgtcatctgaaagaaaattttacacaacggatgttaagatcaaatcatagaaaaataaagagcaaaattcaggtttacagttcacatgcagatcagtgaaacccataccttctccaagatggtggttatgttcatgtttgccattttagctaaaccgtatccaaaagtccttttccgcggaactaatcactgttgccctgctggaaataacaaaaatcaagtataatgagattaagttccattactggcaaggtgaacagcgcacattgttgagtgtttgcatgctggcacagatgcaaaactcatccactgccaaactccagttcacgatcacagtgagaatcctcagttcctcgctcctttaaaaaggaggtgggcgtgatggtgtggtgtgctctattctacccccacttcggaaaatcagaagatcctcctccctgctagatctacggcgatacagaaccgaaaacctaacgccacgagcgaatcattcggatcgggcacctcgggttcaaagccctagaaccacatcacgcctgcagaaaaccagtcgaagcagcgaaacaaaccaaccaaccaaccggaggtaccaacctagcgatggtgagcccttgacgacgacgacgacgccggtggggggtgggggctagtcgagcggagggcggcgtctccagtccagtccagtgagtccagcacgcggcgcgatcccagcactccggggcccgagacaacgtagcggacggcgggaaccgcggcgggggggcgactccacgcggccggctcgccggcggcgaggggtcgggaaggggaggcgggcgggcggcggctagggcttggagagctcgctgtattttttgccgtcacggccctgacgccgatgggggattgaggggttttgggatcgaagggtggcttctactagtaggcttggcaaggtgggcggttgggcttttgggaattgggcagccttggatgggatatggtttcctatcttttccctgaggtttttccctgtatgccattaaaaaagatgatgtttgtctctgtgccactaaaaagttggagcctctttctatgccatcatcgaactttatcgcgccctccacactattccgtcgctattctgtgtgggtttaaccgtttggcagatctgacatgtgggtccgggcagaaaaaatgtcgctcttaccctttcagagagaggacaggcggcgtggcggacaagcggccaggcgtggcgctgaggcaggcgaacggcgcggcggcaaggtggccaggtggccagccgaggtgggcggcggcaaggcctccgccgcagggagcgatggccaccgccacctccatccacgccgcccaccgcagccaaatcgagatccctccccgtcctccaagccggcgactccctccccgtacagcggcggcattggcgtcatccgccacctacaactccctctgctccgccatcaagcgccactcccgcaagctcgacaccatgaaggctggctcctcctccggtgctgacgccttcggatcatcccagcccgtaggctccttctcgtcgcggaccaagaagatggatgaggagcggcggcggccggggagggatcccttctcctgccgatccgggtgtcggagtaggccggcaggggcgagatgaggaggagcggcggcgacggcatcttccccacatgtacatcttccccgggcattctctggccgctccttgaacacccacatatacatgttctccatgtcgtgctgcactaggaaagcatccagtgtagcattgttaccgttcccacggcggtgggggccttcgcctttccgttcttgtcagccaacatgaccggcttgaagtagtgggtgaagaagaaccacacgccccatatggtatcattcctcttcacacacttgcaggcagcgctggaattggagcccttggcatgtgatacaacgaccgtggtggtcgccgctgccggggcaggggatacgctggtggcagcaggtgagtccgagtcgtagagctgcggaccgccgaggccgacatctagcatgtcgacgttggggtcgtggagggcgccggcggccgcatagcagctacctcctcctctccttctccgtgctcgccatcgtcgaccagctcatcgacttcccactgctctcgttcactatccggccggacgccctcgagcatgccaccatgtacctccacctcgccgtgtacgcgtctgtggcgctcgccaccgacggtgttgcatcctcccaccatggcgacgcgcaggcgcagctcggggacgtggtggctgcgctcgccgcgtcggtgttcggccaggagctgtttccctcctcccccttcctcggggccttggggaccaacgaacgaacatgtcggccccaggaacgaacggcaccggcaagaacgcctaagggcaactaagtcatttggctgtgccgttacccatcgttaggaccaaaaacggacggaatggtgtggagggcgcaataaagttcgacgatggcatagagggaggttcgaacttttcaatggcacagaggcagtcatcatctttcttaatggcatataggtaaaaacatccttttcctttcctttccttttattttcttctcttttcttttcttttttttaaaaaaaaaatggttcggagatttgaaaatatagtgtgagtgtgagttataatcaacaaaagtatttctagtggtagacggcgtactcatcaacagcaacatgtccgtggtgacttcgttaatctcaaaatgtgtcggtccggtttcccgggtgctcgttgtgcatgggtacgatcatagggtgagtatgcgcgctttcatgagcgcatgcatttatactgtttttctgaaaaaaaaacataagtttttattatgtatttgtcttatctttcgcttcaaaataattcatacggttaaatcagttgtaatcacatctacatataatttaaaaatagtgtgatatagatggtagtagtagtgatttatattatatgcaaccaagctagatgtttttttaacccaaagcttcataccgatgctaagttcaggccttatgattgatgttgattacatctaggcatgaatgtatagtgttacagtaaggcattgttgtctttctgcagcttttaaaattgaattagaattagtgaacgtgttgccagatcgtcaaataaaaccgtggccatgtcctactaaagtagcaatttaattggtcacgtagacggtcagagttagttcgtctctgtaactctcattcacggttggtgccagttgttgtcgtgactttgttccttttgcttatgtgggtatgtacaaccatacgaaggcatacaataagttatgaaaaatcaagctgcagtatggattgattttgctatcctactatgtccataagtcatacgtgaaaatttccgattgaatttgttttaagattcatgtcaacgtggaagggttttgctatcctaccatggacaaaatttagacggggaatctgttttgttttttcatgctagtagcatatggagtgaaaaaaagaaaggggatttttagtttatcttcggatggatataggccatccgtttattttgatccactggatcacatttatttatactacaccatgtagtatgcacagcagaaattgtatagggttaaacctggaaaaaatatcccacggcagttaagtaaatttgccagcttcagtgacaaaaacgactgaaatttagcaactaactcctagtcacctcactgcaagtgggccagccctagcgcatgcagggttttttttacaggagcgcatgcagttctacgggcctcatcgtttggcttttttcgtaataaaccaaaacggtttattagaaaataaaaataaatttgtagttaaaacttttatatatgtgtttttggtgacttaaaagtcaatgctgaaaaaaaaactacgttaaaaatatctcaaaatcaatgccaaaattaagtttaaaaatttaaattttggctttttctttggctgaataggtatccgatgggagaccatgattcttggacagttcagtgtgaagtctgattctgtttattattttttggcttctgtttattgtttgcctcatcgagagaagcacaaacaaatttctaaaagatatatattggaaatttgatcaaaatgaggcctctaacagattcttaaacatgttcgcaaattttatccacacctaaaatcggtgcgcggtcttttatccgaccatgccaatttattttggatctatcaaaaatatggcgtcagatttttagttaaaatctaatataattgcatatgtaaatcagtgtaatttcatatcatatgtaatttaagaacttatattataaatacatactaattattttgggttaatttgatccatgccactgcaactttagctattaaaaaaataccattacaattcacctattttcacctatttgtaattgtgccattaaaattttataaaaattagaaccgtgccactcccgtcgcattttctatccttttccgtcttctcccgttctccgtcgcagcgcgccgcacgcagcgccgccgcaacctcggtcagccgccgcacgcggctgcggccggcggccttggtcgaggaaccccacggcccctccaccatcctcacgacctcatccccacgcaccactggcgccggcttgctcgagttcgccgcggactggactgaggaggagaccgacgccgctggcgagttttggacgtgcggataggcggcgggaccaggagagccggcctcctagcggcggcggcggcggaggaggaggcaaggcgttggtgcggtcgcagaccccgtgccgccgctgcggctactgctgctgctgctgcggctccggtcctgcgcgccccccgcgccgccgcggcgacgccgccgccggctgcgccgacgcgtgaagccgcgtggacgccgtgcttgccaccgccgccgcggttgcggtcggctgctgctgctggaccacccacggcttcgcgccgatgggtacagcgctgccgctgcggccgacgccaacgccggctgcgccgacaccgtgctcgccgccgctgccgtcatagacgtgctcaacttcgtccaggtatacatatacgtgattgactcgtactcgcatccacttcattgatacatcaatcgtgctgctgattatatatacttcgatgatatatatcaatcgtggtgttgattagaccaacaaccatgagagattgagagagtccacttcctagatgcagagcacctgtgaatcttatgagaaaaaaacagagatttttttcttcgattctccttttctctttcttttttcttcgatttcttctgttttttgtcttcctaatggctgacgtgccgtggctaggcatgaccggcggcgtgatgcggatgaagctgggcgacggtggcgcggcccgacgagggcgcggcgaggtcgggcggcgacgcgaccttgcggtggccggcgaggtgcggatggcggcggggcgtggccacgcggttgcggcgcggccctgcggtggccggcgagccacggatggcggcggggcgcggccacgcggtggcgccgcggccctacggtggccggcgaggagcggcgtagcaagccgaggacggctcggtgcggcatggctcggtggtcgggcgcccccgcggttggcgcgaggcggatggccggcgccctaggcggtcaacgacgcgatggtcggcggcgcggcagccgagcgcatgcgtgacggcggcggccgacgttgcctctcctgcttttcccctgttcattttcttgttcttcttcgaccagccaaaaacgagacgaagacggcagatagaagggaggagacggcaaacgtgacggtagtaggacggttttaattttgtaaaatttcaacggtatttttctgaatagccaaagttacagtagcatggattaaattaagaaaaaattataaccatgccattataattttacaaaatttgagatatgccatcctgacccacatgtcattgactcatgtgggttattgagataccgatggtatatctcaaactttgaaaaattataatggcatggttacaaattacccttaaattaacccaattatttttagcgaatccgtttattttctggtggcgccaatcctttttttttttcgcccgcgtctttttccccactctcgcgccgtcgtcttctttctctcgctagctacgaagtccacccgaagaagtcgccgtgcgccgtctccctcctccgtgcaggccctcgcctcccctcggcggggccaagggcgcagcttccctccgcccagatcggcacggtggccctccaccccgtgcggcggagtccccgtcgacgtagggcgtcgccggccggtcctccgtccagggcagcgccggccacctcagctgtccagtgtcttccgaatccagggccaaaggttctgcttgcttcccctcaatccaacatctattcctccccgacgtgaacgtcgccggtttccctctggccaaggtgagcaaatgctgtttaatttggtggtagtagtacttggttgaagcaactgctgaaattacttgtctggtacatgtgtgcacaaagattgtaattttgttcagtttgaggttcaattacaatgatcgatagggccagacctgaaattgaagttaaatgctactagtaataattgtactagttgaatataaaagaaaccataaaaatcaacaaatgcagatgaatctgtttcagtttttttttgaacgccgctgttttaggttttaagttacctagacagagactttcagtttgtttctttggttcagaattgtggaactttaggagcctatcatgttttgatctgttcattaccatgtatgtgatttatatcgtggaagatgatggcttggcggtatagtttcagtaatctgaaaatcaattcactgtacagaataagagtgctccaacttcagcctcaactttttatattcacatttataattttaagtactagtatatttatacatagaaagtttatgttgttcctctgagatttgatgggtcagagtaaaaattcagttctatgattcttggacagttcagtgtgaagtctaattctttttcagttcagtgtgagaacatggtaatgtgctttttagcatggaggataatggcttgtcattatagtttcagttctatgaaaatcaattcactataaagaattgtctgtagctgcttatgtgtacatctagcaagcccatctgcgtgcgtggaaagaaactcgctgcccaccgtaaaaaaaatcgatgcaacaaaccaaccactcatcccaccttgctgctacgtggccaaccaactaatttttaggatctgattagtggattttgagccgcccaattctttttggaatggtcccaatccatagtttttgggagctaatttttagggaatgtgttttaaaacatttattttgagttgaagagccataatagaaagtgccatagtacattacattttttttttcattgaaagatcatgtacattttcatgactcgaaagtttactcttttttcagtactgaagtctgaagatctgtttcatccaccctcctattttttttttctaataatggaacgggtaatggaatgtgattacccggcttcaaagaagaacaaagtggttcatccaatggattgcgagatgaaggaagagccaaccaatgcagcaagcatgaatcagcattctctctggagccagtggcagctcctggattccatcctcccaactggcgggttcgcgcattcgtatggccttgaggccgcaatgcaatcccgcatggtgaacaacccagaggagttgaggtcatttgttgtccaggtcttggagaacactggcagcctgttgcttccatttgtgtgctgcgctaacaagtctcctgatgccgcaacgtgggtgaagctcgatcagttgctggaagctatgttgacgaatgaagttagcaggaaggcctcgatgtcgcaaggctcggctcttctgagagttgctgcttctgtattcactgagattcagtcgctgcaggatcttcgacaaacattccttggttccaagattgtgtcgtttcaccatgcaccgatatttgggttgatatgcgggctggttggattcgacagcgagacaacgcagcgtgcctacatgttcgtcacaatgagggacgtgatctctgctgcgacgaggctcaatttgatcgggccgctagctgcttcggttctgcagcaccaggttgcggaagatgctgaaaggatggtgcagaagtggaaggatcgcggtgtcgaagaagcaacgcagacatcacctctgcttgatgcgttgcagggttgccatgcttacatgttctctaggctgttttgcacctgacaaggaggtgtgcttcatctccctgtttctttcttttttatacataatcccctcgatgtgtttgcagagttgccatgcttacatgttccataggctgtttctgtacatttgttttgaatggattcacctcaataaccatgtcaattttatgacacaaacacttcaattttattgtatgacacttccataatgttttgaaatgtgattagtgcagtgcaatgcaattgagtgatgaaataaaattcagatgagtgatgtcttacatgatgagcagttcactcaaaccagtggcgcattttttcccttttaacatataggagttctttgagatctgacaagcccattttcttgccatttaaggccacgaaacaagatgatcatgtcatacactgaactattgaccttactctgttcatcccctgtctcttgcagattgctaactgcaattcgctgtaactcagcccacggtttacacttttaccctggacggttggaggcagcagaggaccactacattctgttaaataaaaagacaccagaagatcacaagcatcacaaggacagattctcttggttgattcttattttatttccaagcaagattgtacatcagcaatgccaacagtaggttacattctttctccaggttgattattattttatttccaagcaagattgtacagcagcaatgccaacactaggttacattcttgtatgtgatccatgtctattatctattacagtgattgtaccatcatttgtcttcagcttccacaaattacaacatcaacttgcatgacacatatcacaaagcagtgaaagcacatcttttttcttctgctccataatacaaatacactggttacatctgttgctccaggcctccagttcctacctaggatccttgaactgtaggggcttgcttggcttcaagggatttctcatactcctcaatggacttgaacagctccgagaagttgcccttcccaaacccgccgcagccgcccttctggtactcctgcccactctcatccttctccatgcacccaatcctttgtatcatctccaagaaaaaggttggcctgagtgaaatagctgatccagttagatttggagtcacagagaggaaataacaatagcaaagatgcagcagaaattagaatactgactgaatcagactattaagcttaaagacaattacaacctcctgaacctaaagtttaagttgttcccagcagcattgctggtttatgctgatggagttgccataagattctttctttcttttgtaaaaaaaggaatccatggaccttagatgtagtaagtaatacttcctccgtttcacaatgtaagtcattctagtatttcccatattcatattgatgctaatgaatctagatagattagcatcaatatgaatgtggaaaatactagaatgacttacattgtgagagggagtactcactaattaagtagctatatgtggctggctatctgcattacaacatgccggcaaaaaggaactgggatatgcttgcaagaaggcataaacagacacacattggcttttcatttttttcctatgcacattcagctttattccctttctagtgtcacaatcttcagaaaggcgcatcatggattcatggagacacataaagagtatccatggagtatcacagagctcactatcatatattatactgtattattcaagcattctggattaatttcataatgcttgacacctttctgcgcctaatcgatgctatgtgccaacaaataactgcaaatctgaattcataagccattttcatcatgaaagaggtgaggattttacctgtctcctactggcttggtgaagatctggagcaacaccccctggtcatccctgtccacgagcaccccgagctcctggcactcgttgatctgctcctccgagagcacgtccccggcgcgccgccgcacgccgtcgtagtagttgggcggcggcggcgccaagaactcgaagccgcccatggcggagcgcgcccgcatctccctcagcgtcccgagcacgtcgtcgctggccagcgcgatgtgctgcacccccgggccgccgtggtggtccaggtacgtctgtatctggctccgccgcttggtgccgtgcaccggctcgttgagcggcagcagcacggtctccgcgttgttggcgagcaccaccgagttgaggccgctctcggcggtgcccacgtcctcggcggtgaactcggcgaactcgtggaacccggtgaacccggagatgtacgcggctaccggagcgagctccggcacgttgccgacgacgtggtcgaaccggcggaggccgtagtccacggcgcccgggttgctgacgccctcgaaacccgggaggaagggcgcgtcggcgccgtccgggtggctgacgaagcggagcacgacgtcgccgtagagctccacctccgcgaggccgaagccaccgccgaggtcggcgggctggaacgccgggcgcgcaccggccgcgacgctggcgcggaaggcgtcggccgcgtcggcgacgcgcagcgccacggcgtgcaccgcgaggccgtggtccgcggcgaacctccgcgcggcgcctggggagaaggaagggatggaggcggtggtggccgcgtccgcgccgacgccgtggtcgccgccgtagggggcggtgaagaggaacgcgacggaggcggagcggaggaggagggaggcgtgcgcggagttccccgtggagaggtcggacctggcggcgagcggcgcgcccagggcgaaggcgaaccggcccgcggcggacgcggcgtcggcgcaccagagctcgacgtggtggaacgcgagcgcctggaaccggtcgctccgcgggttggcgcggacgaagcggcggtgcccgacgaggcggaaccccgcgttctcccccgccgccgcagcggccgagacggcgccggtggtggcggtgggggtgggagtgggaggcatggcgcggcgcggcgcggcgtggcgtggcgcgtcgtggggtgtgggggagtggatgacagtggcggcgtggggggaggagttggtggtggggggttaaataaagggaggagatggcgccacgtggacgctaagtctagtggttgcggacgggatttgtcctctggtgctggttgccttggctgctggtgaatttgtgaagctgatgagtttgttactttttttttttttgagaaaagttggtgactgttctgatttttagagggaaggggaaacaaattttgtggtaacttggagtaaagctcttgtttttactaggtgattatatgttcaatcatttgttttattttaaaaacatgtgtaaacataagaaaatataagtcatatttaaaagtgtttttaatgataaaccaagttaaaaaaataaaagataattatattccttaattagatgaatgataaatatatatttttaaaaattgatagtgttatctattaagaatcggggagagtagtaatggaggattttcttattgcaaatggatggatggtagtgtttttcacatcacttctctaaaacgttttgtgccacatatattacctcggtctcgatagacatatgaaaagcggtagaatgagctgtctcaaacagtcaaaatctcaattgaagatatctctactgcttccttaaaagcatttgatattggattttgatttagtgtgacgttagccattattttgtattaaaataagtttatgaggccttgaaattatttgcaaagacaaatgaacacaacattttttcatgatttcgatgtaaatattttgatagtcgttggccgtctaagtttcaaaagattttacgtaaaacatcaagtgtttattaccgctaagcagggtttatactttgttgactgaccatcgataatcaccttcggcaaaatcgtcagtaaccgtctggttatcgtgatggctcttctttttttcgaatttgaaacagcgtccttttttaagggatggaaccattccgtccggcagaacgttttctaaacttctaaacaataccattttcgtaaaaagaaattatatacatttttcatatgaccgttttaaatatattatcatcaactattcgtgaaaaaaaaagaacacactctatagggctcagaatatgatagaaaacgatatgtcccgtagcagaacatcatcttggtaagtaatctctccgtttcgaaatgtttgacaccgttgactttttagcacatgtttgaccgttcgtcttattcaaaaacttttgtgaaatatgtaaaattatatgcctacattaaaatatatttaactatgaatcaaatgataggaaaagaattaataattacttaaattttttgaataagacgaacggtcaaacatatgctaaaaagtcaatggcgtcaaacatttcgaaacggagggagtaataaaaaccctcatccaaaaaaggggataataaaaactactccctccgttttttaatagatgacgccgttgactttttctcatatgtttgatcattcgtcttattcaaaaattttatgtaaatgtataagatataaatcacacttaaagcactatgagtgataaaacaactcataacaaaataaattataattacataaattttttgaataagacgaatagtcaaacacatgagaaaaagtcaacggcgtcatctattaaaagaggtagtatggcatactacaaaggagatctgaaagtacgaatctctctttagctttttggatagaaacgtttttgatctcttgatctcgatcaggagctggataagcgattgagtcatcgctgtgctgccttggtttcttgcttgactgtctctgttcatcagttgaagtagatctctcgacgcctcatcatccatttctgaaacccttgcaccattcctgcacgcatgttgctgctggccgttaggtgtcactgcaaccgtcacctgtccatcacgcatatgcccatccagaaacggaccaggagggctgcagtgtcaaattgacttactagcaacttgaaaacgatgtaaccaagaagcaaacaacaatgagagcctgtgcaagaccccaagagggcagcactcaatttgggaagccaatctggaaactcgagagcagaagttgaattcaaattggatttgctatgcggctggctgcctctctcgcgagaggggatcgaaatcgaataggtgtgtggtgttggttatgggcttatggcgagcacaaggtgtgttcgtatactatgtactcagaagtcaaaacctttagaagcatcaaaactaatccattaatctagtatacaaactactgccaaaagtcctaaaactaggtacaagtaatcccgtacaaccatggaatatatatactatatgttaattgcacacatatgtatgcaagaattaattgcagtaagagcaaaatattacaactagctagcttctaggagtacatgtatattttctaggtgagccagcagcaaggagaagaaatcgtaagttcaaggttaatggccgccggcggcagcggctgtgtggaacaagcaaaaggatgacgatgaccatgccgcgttgatccgtcgtcgttgatgatgttaggcgccggtggctggatcagaagctcgtcgtcgtcgtcggtgatgctcgagccaccgtctttcgattcttcagcggcgccgccgctgatcgacagcgtcagctcgcagccgtcgtcgtctccggcgtgcagcgcttgccgccggtgaggtctctggtggctatggctcccaattccagctgctggcacctgcaacaagaaaaatcaatcaatcaatcaatcaatcaagacactcaaatgagccaattaattaattaattgattagcgttcttgatctgtcctagtattaattagagctagaagaaaatggttaccgttcttgttgcaaggaagctgaagctgctcatctgtcgtctctgctgttcatcctgctgcgccgtcgtcgtccaatcgatttgtggggtgacaggatgacgacggttaacattgctactgttgttggagttcctgtacatctgctccatgcatgacgcaaattaatttggtttaattcgattgaaattaaaagagatgatgatatttttagtgtagtcctggctatatgtttttagctacctgaagatggcttttaacgtgcgatatactgactcccttagcgcccatcagctgcataattcgcttcggtgttgcctctgtaattcagatgagaacaaaaacaaaagttacttcgaatttaatttttagggattagtacatttttaaataccgactaataccacggttcagtttggtttctccgaatagatggcagtacatttcaaaattttcgattttgtgatgatatatactccttctgtccaaaaaaaaaaaactaatcctgggtttgtcaggtttaaacccaggattaggttttttttttaaggacggagggagtatatatctccaagggacacaaacgaagtctcatattgacgtgtaattttttttctcattcgtgaataaaaaacaaacggaatcttgagaacttatccttttccttttaaagaatgagcaatatttataaatgcaaaagttgtatattaaatgtaccatttagaaatttaaaaggcatgtaagaaactgcagtataagatagtaaaggaactggtcacaatgctaattaagagattactaggggttattcagattgtaactaaaataaaccttaacaaattttgataatgccaaaattttagcaaagtttgacaagaaactaaatatatgcatatatttaacaactctacttagaaaaaatggtttgaaatgctatcaatctgaacgagtgattggtttaggctttatagttgagggagatcaaattaacatctaaattaactgaccgtggcatccgccgaggcggcggacggcgtggacgaagcggcggtgcagctcctccggccaccgcatccgcggcgcctcgctccggttgtaccgccggacgacgaccggcggcgaccccccgccgccgccggcgctgcccattcgatctcttcttcctctcgctcccatattagcttccttcaatctagaactactagaagcttaattagcaatgcgacgatcgatacgatggatgaagctagtacacatgcacatcagtacacatgtatatatgctagtaattccattaatttgtgcctaaccctgggtatatatatacaagcaaagctaagctttgcttatgaaacgtacggccaagtgaccactatctgtaagaactctataatgagttgataattcatctaagaagccgtacgtcatcactttactgacctggtccagtcaaaacacgcacgcccgcatgcatgctgaattgctgatagatcgatactaactatgactctctgagatatcagatatgcttgctgcctcgtagcattcacatgaatatacgaataagaaaaagaaaagaaaaaaataagaaagaaagaaaaaagacaggcttatagctcatctattgtactcgtggttatatcagctataaacttatatagagaaaaaaataaagaaaaaataattagtgttgacgtacactaatgcgagagctaactctacacatgctctaaaactaattacattaattacataagtgagagaaaaagagtgggaaagagaagtaaataaatataatcttataactaatctattatatatgttatctctaattaatatggacttgtagctaatagttagcccactattaaacttgctctattgtgtactctttatcttgggttgtcagtctttagattgtttcttcttgatggttggttttatcttttaatgagtgtgaaattgtaataattgactatagctctttgagcaaaggccgggatgctctattccattatctaaaacaattaaacttgctctaatagacttatatttaatagttagctctaatactaagcttagtactagctggtttgataatattagcactaataattatgtatattttttttatcccataaaaaaataattcccgactgtctatatacacggttggaatttgatttttttaatgtctggaaatatttttttttaatcaagggcaaggagcccccatttccattactagaatatatctggacatatataggtcctatttagtttccaaaaagttttttccaaaaacatcgcatcgaatctttggacacttacataaaatattaaatatagataaaaataaaaactaattgcatagttagaggggaaattgcgaggcgaatcttttgagcctaattagttcatgattagccatgagtgctacagtaacacacatacgttaatgacggattaactaggctcaaaagatttgtctcgtggtttccaggcgagttatgaaattagtttttttattcgtgtccgaaaaccccttccgacatccggtcaaacgttcgatgtgacatccaaaattttttttttcgcgaactaaacggggccacagtggctgctgtttcaattcgttggtccacgtatgggtacggcacgcatatgtcgacgtatgtcgattgaccctacccttaccctatatggcttgatcgaaatgtaatataattaattatatacatttcgtcgttcattattgattgtaaaatataatcggtcgaatgtcatccacacgtgctacagttctctcaaaaaaaatgatattttttttacaaaaaaaatcatctatatatacatgtgatcgatcattgacaacgatttgttgttagaaaatgaaacgacggattaatcggtcaatgtaatttaatcaaaggtcgtggtttctgatcagccgtacatagcaaatggcagtgtcaggggactagtagtactccctccatttcaaaatatttgacaccattaactttttagcatatgtttaaccgttcgttttattaaaaaaaaatgtgaaatatgtaaaactatatgtgtacatgaaagtatatttagcaatgaatcaaatgatatgaaaagaataaataattacttaaattttttaaataaaacgaatggtcaaacacatataaaaaaatcaacggtgccaaatattttaaaacggagggagtactttttattccgtacggaagtcgtactaatacttttcttagtatacatatcacgatcgatgagtgctttacattcttgtcaagattagtgtcaacggctaatgtcatgcatgtggatgccgcaatgcaaacacatgtttctccatgatattggtcgcttgtttagttgtttacacgatcaaaagccaaaaacagtgtgcacgaaagagttgtagctagctagctagctagctctcatattgtcatatatagggcatcgatcaaagtggttccaagtcaggtgaaccgtattattaattctccctatatatatggtcatccgttcacgtcctaaattaattccttcacccctaacactacaaattctttaacatatatatgatgcttgggctaggctaaccttttggacgagctaaattttgaacgagttctattgacagagcagaaaaaaattacgattacaaaactgtaaagtcgtaagaaaaaatgaaaaaaaatatcaccacccacacaccgacagcgccaacacactggttgagttatctagactagaggttttgttcatcggttgagttatctagactagagatctactttatttacacacaagtcttttccttctttgtacaattatcttgtacatgaacaactaatttatcttccgctatattcaacgaaattggtacaccaaataccgatttattttttagaaaaaagaagaaaataaccattggaatctgtttttatttttcaagagaataacatatttataactaacattattttaccatctttaacaagttttgaattattactagctctaaaatatatacttgtgcctccttgtagagaaaatcccttatgtacggatgtacccataaattttcacctaatcccttatttgcccttaaattttgccttatcccctacttaccatcgacttttcatctttatcccctatatgcctattccgtgagtccaaaaaaatgtctatattaccctttgtctacttattggttagagttgattgaagaaaaacacggttctcaacataaaagttgattcatttataaaaacaaacatgacataattactttatcataaatttgaaaactaaaacttagattttttaaaaataagtatcaaattagatttgatgaaatttgttcaatttttttgctgaaatttaatcccaaataagaaacaaatttggtttttcaaatttcgactaaaaccttttgtgagtttcatattttaagaatgatttaaaatttgtttttttttctgaaatctggtgtcaataatcacgtctcttttgattttttattatagattaagattttttataacgagacttatgtttttaaagtaggtagcataaagtacaagcgaagggtaatatagttatttttggagtcaaactcaaggcaagggtatagaagggatcaaaataaaaactcagaggtatgcagaggatgaagcaaaattcaggagcatataagggattgagtgaaaacttatgggtatgtgaggaattttcttgtccttgtactccccgatttcatattctaaaatgctttaacttttttcttagtcaaatagttaaagtttaacagagtatataagtagaacatagtagtatttttaacacagaataaattattttaaaaatataaatttaacgctagatgtaataaaactaatttgatattgttaatattactaaattttcgaataaatttaataaggctaacgatcgtactcggcccatccaaagcccaggcccaacaagaagtagaaaatgggcccaccaccaaatctccccctgtccttccccatccactttccctcttcgtctccattcaattcaaaatcccctccgcttctcctcctctccccattcttctcctgtctctctcgccgcctccaattcctccaaaccctcatcctcctcctccgcggcggcggtggcgacggcggcggccgcaccatgggttgcttcctctcctgcttccgcggcgcgggatccgatcccgccggtagcctccgcgtaagccacagcccccttcccccccgtcggctccccgatccgacaccccttcgtctctgtgtgtgtgtgtgtgtgtggtgatgatttttgctgccttgttgcaggatccgctcgtgcgggagagccggatcggggaggcgttcctggacgacgagacgagtgggttttctcttccgttttcaactggatgccctttgcaatttttttttttgttttcgctgtgtacgatcggatcggagctgagggtgtacggaggtttatttggtatttctctgcagaggttgaagcgagcgggacgctggatggggatcgcggaaatggcggaagcgtcgacgaggagctctggcgagaggtagctgcaacgttttcttctctacctgtttttactgttgtgtggcgatttcatcagaacttggtggcatatctcgaagcaccaatgtttctagagtgatttatatcaaaattgatcctcatggttggtgaggagtaacaaaattggacctgattgtgtaatctacagtgtatctcattgtgttgtcacctatgtagtattgatgtgctcttccagtggactcccttgcagctttgtaggtgcttggttatgctctctccttgagttgtaggttatgcgaaaacgacattggttgccaattttgttgtttaggtccaaaatttggctcttaatatagtcgcgcttcactcgatgtgcatagaatttaccgctaaaattacaccttaaatctttctgaagctattttcatgcctgcacctatcctcacaggcaaaattaaactgcaaattattttactcttttttactttaagaatttgcaaatgtgtgttaggtcacaaatcagtgttcagctgtccagtccattaccatgtcaagttcttttggcactaacctcctatagatggatgagataaataggagtagttgataattctctgattatcaatattagtatccagatatatattatgctacagttacactagagtgaaggcagtgagctttttgcaggtcggtagattatatttctatgatgatcactcgatcagttaagattatattcttcagatataatgttgtactgattttgagctgtcagtgtctagttttcattcaaagtaccataaaagagtttactgatgcccaacttgctgtctgtaggtttatgtgcatgatattggtttatgtagatatattgttgcctcgatcaaatctatcttgagattgatgcaaactttcaacattcatcacatcttctatttagtataacgcccttgcacatgcttaaagaactttgaatggatgtcctacatgtacatgtggtttgcattttcattgggcacactacatggaccataccatgttttaactttcacggttctgctttaacagttgaacttcatcaatacatgttacattataatcaattctttttttttgcggggacattataatcaattcaactgaaattaatttcatagcatctctctataaccaggcaaattatctgaaatcatgtggtgcgataggagaaaccccaccagaaatgctgaaagggtcaaaccaaatcactgaagaagaaactaatggggtaaggagtgtgtttctgcatctttgtttactaaaatcggcttatgatatctttattttttaacacatactgtaatgactaatgacacatcatgcattatgcaggagcttaaaggagcagcggtgtctgaagaaaacttatctgaagggtaaacaaataccatcagttttcatgaatataacagtattgaatactactgtcactaccatggtcacataaccaattcttcctttcttgtgatacaggttcaactgtgatgagcatagtgctttgaaacatgaacaaagcgattcacctcacccaacccctctggttctcagaggtgatatgcaaactcctggtacactgaatactgcatataaggagtctttaaggtctgggaagcgtgcaaggaccaacaagcaattcatatatcctgtcctcagacctatcgagaacaaattacaatggatggaactaagagacgactcttcacctatcctgtcattcaatcctccaaagagaagatacttgagcacagattgtagcgcgaaacctcaagagtccatcacaaattcaatggctacgcaaacagcgcgaataactcctgcttccttctcatttcatgacattactgcagggcaagatcaaggagtgatatctccggaggaacataagagtgagaatgacagcagaaagctgttagatgatgcagatcaattgaaatacaacgcagacagtgagaggaagggtgttgcaagcctttcttgctggcttaagcctccatcttcagctggtgggagtcaaagtgacacggagggcaaggtggtaaagcaaagatgctacgagaatagtgttttcacagacctgcctatctttacagcttctggtctgaactgggacaatgacaagcctactcctgtgttgccaaaggtgtgggatggtaacggtatcccaaacacaactaccaaatacaaggaggtgaatactttcatccgatgctctctataccttgcacttactacttatttgccctacttacactgttgctttgctgttatcaggaccagaaagtcagttggcacgcaacgccttttgaggaaaggctgatgaaagttctgtccgatgagaaaccgcatcatcaaaggtctcctgcttatgctctaatcatactctgcaacctactgttacttgaaattactactaatattgacatcatgatccttgcaccaggaaaatcagcggaaagctgatccaacttgatgaagagaccaactgaagacccttgcaagaagaccatcatcctcgtagcatttgcatcatcatcatcatccttgaaacagtgaattttttgaaagggccccagctttggctaatctgatatggactctagctacaagctgcgcatcttgtcatctgtacagcattcgcaaatagggtgtctgagctacattctcgtcaaatttcatttcggaccgttattgccaagttgtcaacttaagttgtcgtttgcaactttttgttttcctctgtaaagaagatgatactttatctgctgtgaacatcaactgccgactggagtttgatagtagtatcaatgaaagaaaacttctcgtgtactccctcctgcgtattacactctaccgtctagccattcttttattaaaagaagtatacctttatttgtctctgcttttgatttcttgtttttctaatataaggaaactatctaggacaaccagaactgcgagttttttttggttgttattagtacctgatacatttccattatttcttttttgactttttaggcaactcatcagcaaatagtggatcaaaggtagtaatccagtctcaatgcattatcacagtaagccagactgtaagactgttcctctaagctgctagtggcagaacctgcaagccagaatcttgtactacaaaggagcaaatagagcttggagatgctagacacattccccatcaacgcagctgtgcttacaattatcgccaaatcattgaggtattttcgtcgagtagcagcagacacagcaaggcacagcaactcaaagctgttcttggtttcttagagagctcaagtttcagtcacaggctcacagtaactggctgacctgaccacatgtttataacagtttcgctctcaggaaatctcacctcaagacacagccacatatctgcttcctgaatcaacctgatggatacagctcggcagtggaaaggacatgttgcattgcattggtccaggttacagtcttgcgctgtggtgaacacacactgatgaacaattggacatggcaattgctcctctaccgagcaaactaactactagggtggttgcagtgtaaagtccagatcacaaaaaatggcacattaaattacatcatccggacagatcatccttgtcagaccaaaacgcatgcagagaggtaaaaaaaagggatcaagaagttcagtaaactacagggaggcttacgatttacagtggcatgaagagaacaatccaagccggtgggtggagattaaaactgtgggctcccaaatcccaatcatggcaagactctggacaggctctgtcacattcagatcaaatcaaaccaccacaaaacaaaaccacaggcagtgaatgtacaactacaccgtgtcaccgtgtcaccagccagatgatctagctagagcagagaggaggagtagcagcatgcaggtattcaaatggtcagatattgtaatcctgaattcctgatagcctgatggtttgcagcttgcaggatcacgggtacgactgttcctttggccaaaaccctgcacctctctcactaaatccatgtcgttttcgttgcaacttgcatccatgtatcaactggttacagatcttgcatttgcaatactcttctccccaagttgatccatgaatctttcatccctaataaaaaaaaccaaaggccgaactgaaccgcactgaagtttcacaaaactgaataaaccatataaaccgaatgcccacccctaatccaatatacttattatgtacagagtactacattatattctatactgaatagtttcttgttcagaaatactactttgtcgtagaatataagagattttatccatgtaactataaaatctcttattattctgagatggaggtagtaacttgatatggaatagtgctactgttttatcttactgtagtagtggtcactatggatctttacatttgagttaaaaggcatgggaccaatgtgtcttctccttggctctccatgcatggggtgagtgataagagtgagtgctcttgcaaaaacctgatctccagcaagcaagcagacaaaacgcaagattggaacaaataaatagctacacccatttgagttgggcaagatgccaaatggtctccctggctgcaccaacagcctatcagcatctaggcatattgatctgcaaaagggtcattacctttgcagcgtttgtcaacttgctgcttgtccctggctttggcacttaactaattagcactcacacacataatcacgcatcgagtcacttagttaatcagctcaaattggtgacttgagacagttcaaccaacctcacatgttaacttggatggctctgctgtggttaaattaattctactgtggttaaattaatcgattgacccatgtcgatcgatggaggtatgtggtgttaaattgttaatgtatgcgttctttttgtgcctacgtgcatgcaggcatatcttttggagattcgtagacgtttttgcatgccgtgatgttcaagttgtagttcaaaattgggagaggcttgtttcttctaggatttggatgtgctagcttgtgaagaaaccaagacaaaagctgcacattgtcctagctagcaagcatagcttccgcctcagatttcaaattgtagttagttttagactcgtgtacaagaattcagaaacaaacacataacacatattaggtgatattcatatagaacagttcaattccaggttgtacagtgcagaaatattgagaagtcgctagcataaaatttgaaagtatatcttaagtctggattttatactatcaaatatggtactccctccattctaaattatagaaatctagtatgtgaaaagatatatactaatgatatgaatttgaaatatgccttctgtcgagatcgagatccatagtattaggatgtttcccatcccatgctaaattgctactccctctgtttcatattataagccgtttgattttttttctagtcaaactttttaagtttgaataagtttagaaaaatatattagttttttaacataagacaaacatattaactaatttaatattttaaatgttgcttaattgctctataaatttgattaaacttaacaaagtttgactagtaaaaaagtcaaacaccttataatatgaaatggagggagtatattttaaaatgaagagagtacttatcaaatactagttctataatcacttggagtaaccagacaagtgaggctaccttctttcgtaagtgttgggtataaaacggtgtgaatgattagcacacaattaattaaatattaacttaaaatatgaaaataaattaatataattttatttttttaatatatttttttcaaaaaaaaacaccatttacgatggaatatgagttaggaaatgggaggaaaacaacacaccctgtgtgttggcagttggcacagagacgaacacgctcaggctaaggggaaaaaacggaatagcgagccggtggccgtcaccttccccttggcgttgctgcgtctgcgtgcgtcgcgcgtgcgcgtgcgcgcgtgggcccgagactgacaggtgggccccacccaccagccgcccacgctttaaccccctctctcctctctctcgccatttacgagagcgcgcgcgcgacgcgagctgatgcttccgcttggccgccgcgtcgccgaagccgactacccgccgccgcgatgaccacgacgtcgccaccaatgccgccgatgctgccttcgtcctcgtcctcgctccgcgacctgctcgagcaggagcgctgcgagtcccacgcgctcgccgcggcgccgcggcgggcgcggtcgggcaggcacgcgtcgccgccgccgcaacgcgtggcgccggaagaggaggacgatgggggaggaggcgcggcggcggtgggcgcggtggtggcgatgctgtcggggtacgtggggaggttcgtgaaggacgaagggttcaggcgcgggctgcgcgagaagtgcgcggcgtgcctcgcgcccgccgcgtcgcggcgtggcgccggccacgccgtgctggccaacctcgagctgggcatcgagagcatcgagcgcctcgccgccgacgccgcctccgcgcaggcgcagcagcgcgacgccaagatccgctccctccgcaactccatccgcctcctcagcgtcgtcgcctcgctccacgcgccgccgcagccgccgcgccacgccgctcccacctccgcccccgcggcggcggaggcccacacctgcggcgtcccgaactcccacctctccgcctgcgcgcagctctacctctccgtcgtctacaagatggagcgcaacgaccacgtctccgcgcgccacctcctccaggtgttcgtcgacgcgccctaccttgcccgcaagaacctcctccctgacctctgggaccacgtcttcctcccccacctcctccacctcaaggtctggttcaccgccgaggccgacctcgcccccgacgaccggagccgccggatgaagaccctgcagcggctgtacaacgatcacctcaactccggcaccgcccaattcgccatctactacaaggagtggctcaagtcaggaggagccgaggcgcctcctcccccctccgtgccattgccctccatgcccggagatttcgatgcttgggacaagcattcctcttccctgcgcagaagctccatcaacagaggcctgtgggtgaaagaaattgcaatctttcctctctctctctctctctctctctctctctctctttttggaatgaatcactttgtgtgattttgtatcaagattatctgaattttgcaggtacaatgcggttttcggcacggcgatggagcaggaagatgtcaaagatacgaagctggaagatgacgagatgtcccaattggttcttgagactgatgttgaattggaggataatccaggttgcttgaagatggggaggattgctcatgtgagtcaacagttgcttgctttcagtacactgattagcctcataattgtgcttatattctcttggagtctcaaattagtaccagcatgttttagacatgagacaaattatggtcactcattgcattctgataattaagttggtgtcaaggagacagctggttgagctccatgaattgtttttgttttctctagtgtggggacaataaaattttttgtctgcatttcgagttatttaagtgctaggcgcctaggcctaattcggtatctagctgccagtaaactgaacaccgtgtcttttgtgcctcacttgatttactcttgccaagtaagtacgccagtaagtaaatttggtttagaatgtgccaatggttttcaaattttgttaccgtttttctgaatcttgctgttcatatggttggattatccattctattggaagtgcactttctgtagaaatacataattttgtctttgctatcttcctaaacttaatatcttagcattctatccttatctagcatagaggaaacaaaagtattgcagaattcaagcagcaggcaaggattcatccgtgtagattctttttgtagtcattttcttcaaaaaagaaaaggattgtttttgtagtaaactagactagagtgtggctgcaaatacaaaagggagttatgttgtaaaaaaacatacttgcaatctgaacctattctcttagtgggacacttttacaatgattttaaatgcagagaaggtgaaactagatgcataatattcattcttggacctgaattatgatgggctagtctctagttataacttattaccaaaacatgcgaaattgggtcaaatgttgaattcagagtatcaaaacagcctttgaatatgaaacacaatttcaattcttaattctaatcttagttcagagatccaaacgggtgtaaggagaaacagccccattttgatataattgcgacagctttagagcctatgcctacctggtgcatttaccattccttgacattaatgtttgaagcatgctaataagttctgatgttcatttgccatagaagctgaatagttcaaccccgtgtaaatgtatatacccttgaagttatttaatttgtgcctgttttgagtagacagagtaacatggggctccaagaaaagcattccgttattcggaaagaaggcaatattccagaaacagcaccaacaccacggaaatcctattctctccgacttttctcgtgtcgtggagatctaaccaggaacgtcatcaaccatcctaagataccaaagaaggaagccgtgtctgtcgagaaagacctagaatgcagtgagctaacaatgaatctagaacgagcagtttccatggtatctagttcagacagtcttacgcagtgcgaatatgctgtgcaagaagttgccagagcatgttcaaatttgcgagaagatccaaaccttggaacttggctgtcatgtccatcctttattcaagggcttctcgaagtcacattcacttccaaggatgatctagtgctggagtgtgcaattttgattatcggagagttgattttaagcaatgaggtgaatagacagattgtacttaatgcagatccacaacttgaagttttcttgagacttctgagaagcaaagagttgttccttaaggcagctatagtactttatttgatgaagcctaaagctaagcaaatgctgtcattggactggataccacttgtactgcacatattggagtgcggggatgaggtgcaatttctgtcttctgtgaaatgtgctccaaaagtagctgcattatatttcctagatcagctccttatgggatttgacgttgatagaaatgttgagaatgcaaagcagatgattgctcttggtggtttggacctgctcatgaacagaatcgatggcagtgattcccgtgagagcaaaaaatgcatctctctcttgacgtcatgtatccaagcagatggcagttgtcgacactatttagttgataatctgaagaaggaacctattgttcaacttctagtaggaaatcagaagaaggctagttctgctgcccttaacttgctgagtgaactagtctgccttaacaggtacaacgattatacacttctgataaggtgtacaccgttagaatttttttagataatggtgcatactgttagattcatgtctactaaaacatcctttgtattgaacttgcttcttaacttcttaaaacagaacaacccagattttggagttcctcaaggagctgaaaaatggtggctgcttgaatacaatgcatattctattggtctatctccaacaagctcctattgcccaacatcctctagcagctgtcatgttactccagcttgatctcctggtaacatcttgaaagacaaatcttttcttcctttgccgagccacatgtttcgtatttgtacattccccatataacagtattcttgtagggagattcttcgcagtacagcgtttacagagaggaagcgattgatgccatggtagcagctttggagcatggttcacacagcagaaagttgcaagaacagtgtgctcgagctctcttactcttggcagggaggttttcatcctcaggggaaccgatcgcggaagcatggctactaaagagagcgggactagatgactccctatccgaatccttccggagaacagagatattcaaagataagagtgcaagggtggtacgttctcatgctaaaaaaaaactaaattctatagttcataccttataatttggtcttgaagctaggttctattaatctctatgctgtctaaattaccaggaagaagaaaagatagttgaagaacggctgaagaaacttgcgctcatgttgctaaacagtgggaacaaaaagttcctcacagcgctgtcaaactgcatatctgacggaatccctagtttggctcgagcgtgcctcatcactgtaacatggatgagcagctcactctccccgctgcacgggtgcaacacgttccagcctttagcttgctccattcttgcgactaagcttgtagatagcctaagctatgacagagttttggaagagagggtgcttgcttcactgtcactgttgaaccttgtgagacatccaggtatgtttcttttggtcatctccaacatgttcttgaaatggaatttcttaatttttttctcatacagtttcacactttctttaggctacaattttcaaacttgatacagtcggtacacagtcatttctgtacataaattttactgctcttgtgaattttttttaaaaaaaatgctttcagtggactattataaacttgtctaagaagagcagaacactgttgtttccatagccatgtaactaggaagctccatttctcgtaataagattgcatcacaatttcgcttcaagcctcattgttttaaggcaacctttcattgtcacagaatgtttggagaagctttacccactgaagaaagacacagtagagtcattgcaagatcttgcagaagtgacatggactgcaaaggagctccttttcgcatgctgtagatgacaaccatctgaagaggaacagtttctcagtctccaagaacagtgtttcaatatgggattagtgattgcttaattacacatttcttttttcttgatatgtaaagcactagagtttctttcccttgtaaagaagaatctggcaatggctttctttcatatgctgtacattgtgataattcgttcgttctggtctctgcttgctgtgagcaatctgataattcgttcgctctggtcagtgaggcctcttactacgacatgtgacacggtgaggacacacatcatgttgtgagactagaaaatctacggagttgctagaaatatggcgctatatgctatagtcgatttttttttcagccacttacacagtagttacaccttatttacaccccacttacatatgtaattagtatgtaattttcgaatttacatatgtaattttagtacttacatatgtaattttgagacttacattgtaaatacactaaaattacatatgtaatttagtgacttacaatgtaaatacatgccgactattttttgatgaaaagtatgacgccataaatatagctacacccaaagtctatattttctccaccaatattttaactatattttttagaaacacaatatgaatgcatgtgcatgcgcacacacccctatggccctataaacgtgtacatatacaatccatccttataaagcacatccgagaaactgatcgtcatatcttgagctacttttaaagatataccgagctaatattgtatttttctcacaaaaagtttaactttattttctctcctcgctccatatctagacaccgctaccaattcgcttgatctatctattctctccaccgctagctggtctaactcgctaattccatccaattcctgttaccagttctcctaggtttttatatagattgagatggtaactctaatttttaattttaaatgctacaataatttatgtgtgttttgacaggaaaatatgtagaaaatagctcctttcatttccctatcaagaaaaagcttttcccttgttcctactacatggagaagacacgcacacagtgcacacccctacaaatgtacaatatttgtccaactctgcaatatagcctattcgattaatcggagaatgtaataaaactgttagacaataacaagttaatattgtatacaaattgtgtggacatccttctctcctctccttccagaacccacctagcatgaagcaacttataaggtttctctattgcctaaaatttgaattttttttttcaaaccttctaaagtaattggttatgtttatagaacacttattatcatttgtatgagatgcaattgatgtatggaacaacattgtaccatgtatatatgaatagataaatgatttatttatttgtctaattgtgttttctattgtaatgatatgcatctaaatcaatcttctaatacataaattaagccaacagaatggcatgactagtcgttcaactcaacactgtgaacttacaagaactaggttgctaacatcgtgtcatggtaaataaaaatttagggtagtttcacttcagcatcatttacatgatcaatatcttgatatctctgtaattcggatggctgttgagaatggtactccaactctaagttcaatctattcatctcatcgtctattttagaaagtatcatcaaattaataaaactagttataggattcagaaagtgtcatctcttgttttgcttctctaaatcagaaaacagattccacacattgaaagtatcatccattgctttgttctaaccatctgatgtgaaggttgaagtgaagtaacataaacagtatataattgaggggggggggagggcacatcccccttcctcattttctcatttttcactctcttatcctctagtcaccgatgccgccgttgcacagtcatggaaaccaagattactgaaagatttatagaaaccatggcgatttatctcatttactcccaattcttttaccaccaaaggatagaaaccatggctatttttgggattgtctttatagaaaccataacgatttttcttctccttcactctgcaaatccttcagtctctaacaggcgttacacaattatggggaaatgagtgaagctgccattgactaatcatggggaatgacgactaagaccacgagtcattcattttttttccttatttactccagtcctttgccattgcctagtcatgagaattgtgaccaagaccaccaaaggttctatcatcgagatatttaactatttaccattgaactcaaatatcatatatacatcatgaggaggtccacatgtcattgatatactccctccattcctttatagatggcagccatgcctaatgcacatatcacaaggcaataaactgttgatctggataattactaaaatgcccctagctctagatagaaaatgcaatgaccaggcaccaaaatgtgtctaaccatgagaacctaccgggctgctcaaatcccagttgagatgaatggagaaagatggagcagactatagactcttcttagggtatgtttagttcacgccaaaattagaagtttggttgaaattagaacgatgtgatggaaaagttgtaagtttatgtgtgtaggaacgttttaatgtgatggaaaagttgaaagtttgaagaaaaagtttggaactaaacaagcccttagtgaaaatgaaagactttctgattggacccacaaagggcaaaattggaaaatggcatagtaggaatgttgcagtgccaactattttggaacaaatgaagtagtcatggctgccaactacaaaggaatcgagggagtatgggtgaaaaatagttaaatggttgtttatagtgtagctaaaataaacttaccaaattttagcagcgccaaaattttggtaaattggcaatattaccaattttttttaaggatttcctatctatttatcaaagtttggcaagaaactaagtgtatacacatctttggcaacttttttaaaaaaaaagatcctcatcggtaagtatattcgtaggctgatcagccaattaagcctttttcaattcaaacaaagccattccatctgttggcttaattgattaatttgctggacgaggaatcttctatgtctggtgcttgtatctcctagtttgtggtattgggatttttatcttctagtatgtataaccactagagagttcacaaattagccacccctaataatccaacttacttgtgggtaatgatccaacttacttgcgggcctcactgtgtttggttgataagcctaagcccaagcctcagccaaacaagctatccgataagaccttggtatgtttaaaatggcatcaatcttaaccgcccctaaatgccaaataacattacagtacaatcttttaattttcaaaaagaaaaaaaagtcaagactaaaaatgggctaattaccatcttacccttcttcctcctctctctctctctctcttgcttccatttttctccttccttccttcccgcacgcacgcacgcacctaccctcctccgccatcgatcgtgctccgatctgcgccgccgagccggacctccgcgcggcgacggcggcggctttccggccggcgagagggccctcgtgggcggcacgtcgtggaccacggcccccgcccagcgttagccccttcccccctgcgctcgctgggtcctttgctcgatcgcttctcgattccccgggtcgcctgcgtcgatctccatcccgcggggacgagcagctgcgccggcatccgctgcttccgacgcatcctcgcttcgctggtgagcatccaatccgtttttttaccccgcacttgtcgaatttgcgttagccctagcttgtctggtagatctggaatccgcttttctcttcgccttttgcgttaaccctagtacgtactgataccagtttagttttgatcccaggaaaatttggtgggccctgaagaaagtagtgaattctgattggattggttgatttctggttcatccatcctaaatgtggtttgcattttcagggagatatgtgtttgtcatgctcaaaatgaggtggtaaggggataatctacatgcaatgctgggtggtaaaaaggttcactctaggagagattggtttaaaccattgcttcaatgaacatcatactagaactcaaccatctcaagcaggtcagcttgccgacgcggcctgtcgtttgcaaaggcctttttatagtgattgcgcttattgtgctgagggcaatcgtatccccgtttctcgccgttaacccgtccgagaaggagggtttttacgatccgacagccgatttgctgcctgggattaggcgaggcaagttcattgaggttccacagattatatggggattgaacaatcagaagattgcgtttgccagggcgtgcttgactgcgagattcctgaaccggtctctgctcatgcctagtttgagtgcttcgcttttctacaaagaggttgacttgctgcgaccaatcactttcgacaaggtgtttgactttaccaagttcaacgcccgttgccaggggttcgtaaggttagctcgctattcagaagtttctaatcaaaccaagcctttcaaactccaaaagggaagtggtaggaggtggaccgtggagaaagacttggatcagctactacagtacagaaggggtgaggcagatgactctgaagtcattgaaatcatcgggaaacatccatttttgtggcctgatcactggccagtgaaagactatgccagaattttcgattgccttgcgttagttccggagatagaaactgaagtggttaaggccatatccaagattagagaggcaggcataaaagcaagacatgaggctggtatttctcataataagcacgtgaaagatggtacaatgaatccaccagtgccatacattgccgtccacatgagaatagaaaaggattggatgatccattgcaagaaatgggagcagcgttccaattcaaaggaaatttgcagcagtaaagaagagatcattcataaggtctcacagatcactgatctacgtaggccagttgtggtttatcttgcagtagctgacagccttctagaagatgattcaataactagcggttggagggtgggtatggttgcttttgagaagaagagacttggagttactgacatctacaataggcaaccttatcttataaagtccgctattgactttgaggtatgtgcgagagcggatgtgtttgtaggcaatagcttctcaacattttccaaccttgtggtgctgtcaagaacacaaaggctatataacatgggagaggcaagctcatgtggagagaatgtcgggctttcatcctatgcctacaatgttattggagacgatggcgggccacagagatggatgacagatatgtcagacacaagcctccaaaacttgagttacggaacgaacaatatctcatgccactgacttatgacataaaacacttgactgaacacgatcacacacacaaggataattcttgggagaattttagctacaaacagaggaacatgttagaaggttgatattggctgccacacttgagagagactttggccaagaattgtctgcagacctttgtgagtgtatacaaaaactgttctctgaagaacattgacttgtattgaacagtctttagtttgtaaagttaaatgttgtgtgttactttgtcttcctccgtaacttttaatgttatggtttcaaaagagcagcttcatactggaatttgatggtgtcacttttcgcacgcatttgcatgaggtgtatttatttgtttgcagtgttccgacttaacaaactcttgatcacgagtactgtgatagcttccctgaaatattctctttgggttagtattgtctcaacacaacttagttgaaatcttactgtggtaagaaagagggctggttgatccagattgatttaactttgaaaatgagcaatattcggtgttacagaagaaaaaacttattttggcccattttcatcaaggataatttagaattgagaagagacgagttggaacttggaactcgaacaatagtctaccactgatacttcaggtttaactgtagtctatcatcttaaagagaaggggcattttgtttatttgatcagacaaagtatcagaatggcatgatcgagctgttcttccagtgattctagcgtgaatttctgtagatgtttttttgtaacataaattaataaaacttgcatgtcgaacctttttttttacttgaattgcatgttgaaacctgatgtatatatttatacattttgggatctttccctcttcttttttttttttactgaaacaggccttcagaaaaggagatgaacaaacagcatttcactgtacataagcttacaaagtttgctcccgagttacaacttacagcatcagcaatgacagaaaatgagcgaagtgaaatgaagttacagctgctactagattgagtgagaagaacaatggcaggtacaattccaagaattgccataggctatctacctacttagaacagccagtgcttctttctggtcttgcgatttggaagatctgaaagtgaagaatatattatgagcatgagggaactaatcattaatgcagaattatcccagcagaaattgctgaaatacatggatagtagataccaactagcagaataaccacaccattatttttttcccttcaaaataacacacgagtagtgcgtgtgcgcaatgaaaaacgaatagaagaatagaaatgttttgtgaaaatagcaagtagggaacctttcttgcccgaagagaaagaaggtacagatcacagaaaacaacactcaccttcagttgcatacaaggaattgtagtgcacctcactccagaagcttaaccaaagctctgcagaaggaaccaagggaatgatcaaacaccaaaaatatatattgggatttacatttaccaacccatgcggatactgcgtacatggatttagtttgctaaaagcaggcaaagatttacagaatgaaggatatcacaagtattgaataatataaaaaacatcatgacaacacaaaatagaaaatgtgacctcaaagttctcaaagatctcaaacaagatatcaaagttctcaactctaaccttttgtgggagtggcacctctggggactatctcgattaggcatgtgtctctaaatgatgtcagcaggcaaatcttggcagcaaactaatttaacagataaaaccgtgttagtacatgatgcctactaatattataacaatggagtactggcaacttgttattgtcaaggaacatgattttgaaaacatgttatttgaaatttcaaaatttagagagaaatgtgaattgcaggcttagggattgcttaatcatcaggagtataatcaactaaatatgaaaaacatggtgttgagctgttcattgagaatttgagaagaacggagatgataggagatggcacttgtatcttttactcaacaagaatggaacagtaacgtaaatgttttcagaaagatcactatactatagacacaaggaaccaataatggaaaaaaagaaccccatcatccaattccacttagaaaattatagcacaggttcctctaaaaataatagctataaaataaacaaacaattttttttagaacaatatattgttaggttacaacttgacagagttttgtgaacaagaaagcatcggattaaactatcgttagaactaagtcacaagataaataatgtcaaaacctacagttagaaggtattttctcataacaaaccaatcagccatcttgaaagtgctatgttacccggtctgcagccgcttgtaaggtcacatgatctccccattctccagatctacaattgcgtaaataaaatgctttaaataaggacataaacagcaagttaaaagttttacatgacaggtgtgttgttgttaagaactagaaccttttcattttcttcaagtacaccttatattccatcggtacatagccttcatagtgtttcctgaattcctttagctaaaccagagagatagtaattcagcatagaacatatcaagaaactagattgatgatgtaactaagttagagacttctttatttgcaaaacaaacaagttttgctaaggaattagtgaaagagttatggaactacctgcttcacgactgacttcctcacatgtttgtgatagtcaggattgcggaatatctgatctgccaaagctcggaactgtaaggggaaaacacatgacagaaataaggactggttggagacacacatcgaaaacttgaccttgcagatgaactgaaataggatcataacactcttttgaaagaggacattatggaaatatatcacgcaagtttatacaggaaaggagatgtgctagattattatagtaactaaattcagaataaatccaaataatataatttgccgagaatatcatattatacagtcaataatgagatagatgacttctccaaatgtagtagaaatgccttttaaatagtttttttaaattatacctatggtaattatacaagcaagtaaaaaaatagtaacctgacaatttccgtctccttcaatttggaattcagctaagccataagtgcccaatctgagaaaaaaaaaagaaagtcaggtaaatgaaggagacatgaatcagggaaaaagtaaagaaaacaacacaaatacctttccagtaatgtttcatggtctattgttgcattattaacatcaggaatttgcccattaactcgaggagtgtgctgccaatgaatatatcagtaacttggtacaggggaattagcacagtagcactataacttgcagagtaatcatggaggttatatggagcatatatcaaaaatagtatgttcgttactaggcaagttctcatgctagatagctaaatagccgaataactcccgtcaaagacaccaaaactatcaaaaaagacatattcaaaaaaatagactagtaccgggatagaatctaagtgggaaaggcgttttccaagactccgtccactgttctttgcttcagttaaaagggtaccaactgtcacatcctcctcactctcctgagtactggtgctaagacttgagcaagaacttttgctagcatgatcctgttgttcagacatgctacctcagagggagcattgaaaatatatggattggctgcaggttccaaaggaaagaatcagtgctgcaatataaaaaaaaatcaacagttaagagcatacatttgcataataacatggacagtaagtacaatattaaagaaactgatggcaagtactcctagcaaacagcaaagtgttcagacacaacactgaatggcttctatgctggaattacctacctaaatattctaatatcaacattggagcatacatattacacagctgctagctcaaaaaaaaaaacatattacacatctggctccaccagatgatttcttgtatccagcatatttgttgcaaaataaactcgctgagctacaaatgccattgattgtctcattggtataaaccagtaaggacacgcaaagaactgaagtagtagaaacgatgcaccagaatgccagatgataaggcaactaatttccaagaaaacgagacaattgtcaactgggtaactggaaggcccgttcctcacacggcaacactactaatcaaacgagataaatctgatattttcagagaagcaaaaatttcacacgcctccttgcactaccgatttactggaggaaactacgaactctctgaacaatacccaagctttagctaaccgtccaagaattataccacacaaaaactgtaccaatgaagccatggatctgagcttgcaacttggaacggactccctgaccggacaaaaaggacacccacaaaattaccatttttccgggaactacaaggcaaaaaaagttgtacagatgatgggtagacctaacattggagcatgggagttcaactgaatccccaatttttttctttttaacagaaactgctagttctgctacaaatacaagaacaagcacgcatcaaagaaatccagaaaactagaagggttaactgaaaggaaccaaccaatccaacttcaggtggctatcccgcaccttgctggttcttgccggccgcgcgcgggaggaggaggagctctggctcgcgcagcagcagatcggcagcagagaggagaggagaggagcgcgatggagaagaagatgcgggaaagaaagaaagaaagaaagaaagaagcaaagcaaggcaacagaagaaaatggaggggaaggagggcattttggtcattttaccttttttttttaactattctcctaatgtacttctaggagtgtttgactggttgcaagttgtataacttgcactccaaatgtcaaatttggtgatccatcagtagagtcaaagcaacaattttgcaagggctatagctttgcattgggatttttatttttattttttcggggatatgcaaagtgctttttctttaattaagattagaaaaaaaagtgattctacagaacaaagtatgtaaaaaaagagaaaaggaggatggtagattaggaaggccgattatctcacaaaacattatgtaacgaaggagcgctccatctagatggacaccttgcttcacgtcagagggcggcttctattgtcaccatctctcctacttcctgcattatttcgcacttgccattaaaagatatacttcctccgtaaaaaaaaaactcaacctaaaagggatgtgaataaatggtagtccagattcattgtactaggatgggcatcccatcgtggttgagtttttttagatgaagggagtagttgtttcgtttcttcctgctactttctgcattgttctagagggaagatttttatttgttttgttttttaagaaggacctgcatttcttttccctgtaaaatcatggtattttttttatatttggagtaactgtatatttgtacgcatgccatgtgtgttgcgtgtgattgacaatgttccatgtggttcatttccaagatttgtttcgaaccaacttgcaggtagccacaggatttcacatcagccagagaggtattttgattaaggattcttgatgctaatgcttttaggacacttcagagaaacacactgtgtttggtctcaagctgcacgaacatggctaaattatgaaaagcatccacgttttcatttttttttaaacaaaagaaaacgattgaatcacaattcacaaccaaatggagaggaaagaaaatctaaaatcagtaccggtgcacactgaacagaatctctatcttcttttttgcagcatcgaagaaggactactactaattatttgtagttaagagtgtactaataccaaacagcatgtgttctattgtagaggcatctctcatttaatatttactcttcaagagcaacaaccagccagttgaaaaaggcattagatgatgaaatgcagacatgatatgatcatgtgaacaaagaatgggagaaattgttcaccactgatgggaaagaaagccttttttactgcactgtagggtgcaaaattactccctctttgatccatcaaaagccaaatttacatcaaatttgaattgcaatcaaagcatgtgtacaacttgatttctggttgtaatttctttctgtaccacaaaatctgttataatacacctgagtttgctcaaggaatggagaattggagaccatcactatgttttcttcatattacagaagggattgaacagaaggatgatcagagcttccttgagatttctatcagggtgttgatcaatctacagccttggcagtgctgaacagttatgaatgctgccttatgctgattagctcgatgtcgaagatgagtgtaccgagagtggaaccctcgccatttgccagacgtgttgggttaaatatagtagtaaataatctctgccgatcaaagaactgcacacgaagcagcagagaaaagtttagttttttttttccatagccttctcagttaatccttcaatcgtagataaagaattaaaatatgaacgttcatatgtctgcgactctgcattattaaggaaaaaagggacaacttctaggttagttttgactatttgacaagtccaactaataaagaacatgtagaaattgcctaaactgggaaagctttaattagttaagcaaaggtggcccagaatagaaaatagaaatccaggattcttgatagcacgagactttgttagaacaatacttacattaggaggaatgggttcttgtgatgtgttctgatatccctgtgacggtggaatgatgacacggcgaagaccaccaactctcatggacttcactgctgcttcaataccaggtataacctgcaaatctcatgcataagatctaggcaaatcatcaccaccctgaaacattacaaaacaaacatcccaagaaacataccggagggatgacagataaaagggagacattgaccaagttgacaataccataaaaaaaatcgcaaggagcatctagaatcttaagaacagatggttttaatgggctgttaagtgagttttacaaataatatgaactgataatagaccccaaatcaggatataaattaccatcctaaaatcaaacctacgcacatcatagcctcataggatgatgtagtttctcttctttgttacttcgccactggattttttttctgcatatgaaagcatgaacctcttctacttcactgataacatgcgtgcacttgtgagttgtgagtcaattacactattttaaagtaccgaagttaaataatgagaaaatatatcagttgtctgaataattgacgtttcaggaattcctttgacactgctcccacgtcatgttacttttttatgaacaaggtaatatcaaaatattgtaactgcaaatttcagcaagcaacttcacattggaagtattcaagatatggcatataaaattgcagactgtagtgtagtatcagcaatctatgcgattcaattctttggaaaggaagttctgatgaaaatctcgtgagttgtgacattatctcacatttccagctccgacggtgaatacaaacggcatcggatcaccggtctcgtccttgtgatcataggtggaatcaaagcgccatccttgcttcgctgccaatcttccatagtaatggattgcaaccttcatagttcatatatacaagtacacataagaaacttccttacatatttttcacaaaaaaaaataaattatctgaatttcaaccacacattcagacagatccaaacatactggaaataccatcacattagaggaagagattcatcataagaagcgaattgaatccattaataccatgattatctcactgccaagtactcctactaggtatgcatttccaaggtctccagcctctccactagcactaggttaatcactttattttgcgcagaaaggcgccggctttacctggtcgccgtcggccgggacctcgccgggaccctcccggaggtctagggccttcacgccgccggagccggggatctcggcgaagctaggggcggcggcggcagaggcagaggccgcggccgcggccgcgggcagtgtggaggcagcagaggcgaggaggaggtgccttcttgggatggtcggggcatgcgcttcggctacggcgaaagcttgggctttttgaggcggcggcacgacgccggcggccggagcgacggcggcggacagactgaccatggagggtcgttggtttttgcaaatcttttttttccctagtttttttttcgttattaattcttaggctatcttcaaaatggtgctttttttaaaaaaaaaagtttctacatagacttaccgaggtttcccctcctctcctctggatacaaatttagcttcattttggtttgacgtccctactaggcctaggagacatttgaagcgcacgttgagaaaaaaaaaagacagtcaagaataggtatgaattgagaaaaaaaaataagtattgacaagcgctcaattctaagaaattacatcaataaatggtgagcttcatgcaatgtcattgtacaagtgactttgttgtaaaaatatcttcgccgctagggtttcgttagcagtgcaccgttaagtgcggtaggatgaacaatacatttaacgatagcaggatggatcaaaccctaataatgatagcatttataggataaaaatcgtttatacaatgatatttcgtggaacccgcacctattgatgatatttcttggactttggtaatgatatttcttgaattttctcttatagagatataagtaatctctccatctcaaaatataaccacttctaacattcaaaatttatcctaaaatataattatttatcccccctatatcttctcccaactaatcacaacctttcaccatttaaattctttattaactttctcttctcaattaatcacaatcttattccatttaattctacctataaacaatatgaaaaacaaaaaacacatgaataatgactattagaatcccagtcttttttttcaagggaccaaataaaacaaatttccactagaatttaaatcctgtaatttttctatattttccctacaaatcaaaggtccgtaagctttttgcaagtggtatataagctctctttgtattttcatgtatgttttgatgtatcaagctcataatgaattttaacatacatttgacctcatacattcacttaaatatatgttgagctaaaccatataaattaccacatgtgcatactagtagggtccgtttgaaagctagtttagcttttgcttcttttttttttcacacgccaaacaagaaatactattagtgtattattaattaaatattactgtattaacgattacaaacttgagaaataggtttttttttgttttttgtctaaaaaaatttctacatacaaagttctcttttaataaaatgtattatttagtagcttaggaagctgcttacagtaaaagggtgttgaaaaggcgaatcgagcaaacaaatacaacctcacatgttacacgtagcaaaccgaatatcatataaagagctataactattgtttcaactcccatgtaaagcttttagaaaataaaatccaatgtaaaatctaaatttatccattgttaacataggctgtatttaattcccttcaaactttcaaaaatttcgtcacatcaaatatttgtggacgaaaaaaaccaattgcacagtttgtatgtaaattgtgagacgaatcttttgagcctaattacaccataatttgacaatgtggtgctacaataaacatttgctaatgacggattaattagacttaatagatccgtctcgcagtttacatgcgtaatctgtaacttgtttttctcattagtctatatttaatacttaaaatatgtgtccgcatacgtcaaaaatattttggccaacaactaaacacggccatagaccttaaaaaaagtgctaataagccacaagtaaatctggctccctccaatctctcatctccttctccctgtgcttcagctgcagtagcatacaggaacttgttaagctgcggttggccaatccggacgtctcacattatcctcatccatcccaacacccaacccaagacagcataaacacaccccagcccagctcgactagaatacgagagaaaaatcccatctttggtctcctccccctccctctcgctcgcatcttccccggagatgccgccgccgccgagatgcgccgccaccaccgcccaccactccctcctcggctcgcccacctgcctcgcgcgcccgcggcggcggtgctgccccgtgcgcgccgccgtcgccgtccaggccgaggcgcaggccaaggtctcgctcatccggattggcacccgcgggaggtgatcgcaatcgatccaaccctttttttttcttctccttctctaattctgggtgctgctcgtgtggataagcggtaaaattcgcgtattttaggtgctgaattggtttggatttggggtcgcggtggctgcgagatcttgttttcctctgggaatttgggtgtttgagatgtggctctgacccaattgcgtcgttagatgtcaggcattgcgagcactggtagaattcaggtatagagaattgaggccgtttaccaagatatgtgcctttagcttcgttttgatggaattttggatcagtgataacatgccattgttaacattagtagtgctaaagaatagacttttgttcagttggcaaaagttggacttttagatgtttcccgtacgattgttggtcaacacgacaggttgtattgttcttgcgctttatgagctagctggaagttacatgtgattctttgcacgattctagacattagatgctttttttttctgattttaacttggatctcgtgtaaattttgcatccacattaaactcttatgaggaattcacaagaattgttatggttgctctcttttcaatattgacttgaaagtgactttatggttgcgaaaaagggactttctttcttttctttgtttttaacaattttttcttgtgatagagtagcttatttgagatatgcaagtatgtaattcaaattattggctgtataggacagtcctcttgcactggcacaagctcatgaaacccgagacaagctgaaggctgcacactcagagttagccgaggagggggccgttgagattgtcatcattaagaccacaggagacatgatcttggacaaacccctggcagatataggtggcaagggtttattcaccaaggagatcgatgatgcacttttgcagggaaggattgacattgccgtccactcgatgaaagatgttccaacatatttaccagaaggcacgatattgccttgtaatctcccacgggaagatgtgagagatgcattcatatgcttgactgcaagttcccttgcggagcttcctgctggcagtgttgttggaagtgcttctctgcgtagacaatctcaaattctctacaaatatccatcactcaaagtaagtacaatgaccactttaatgacagttacagtatgcgttgtagatttctattgtgaaagggtggtgttccatttcaacttcgtaaaaatatgactagttcaggatatgcaatgctagattcacattggttaatgtaggtctaggttctaatgttagtgaatgcttttcaggttgttaacttcagaggaaatgttcaaacacgattgaggaaactcaaagaaggagatgtccatgctacattgttggctctagctggactaaaacgcttaaacatggcagaaactgcgacatctgtattgtcagtggacgaaatgcttccagcagttgctcaaggtgctattggaatagcttgcagaagcagtgatgacacaatggtagggatctaatgttttaatttgctagtagattaaagaaaatcatagagtctgcattcataatgccatacccaaatctgaactgtgctaccttttaattctggtaaggtgacaagttcaagcacctctagcctttttttttcttctgttctcagctgtggcacatcatgctgttaaaaaatgacagatgattgttcacaaatctgatgaccttgtcaaccaacgcttcacattttcatttacctactccagccttgatccatttgtttgttgctctttatcctgatcatgctgcatattttgaatattttaacacctgatagactcaaaaataaaatctattagaatattcttaatgcctggcctcctgtacagctatgcagaatgtgccaactgcttgcatgatctgtttcatttttatgcactgaagctagataatgaggctcttttgtccttccttctgcagatgaattacttgtcctcattgaaccatgaagataccagattagctgttgcatgtgaaagagaattcttgtcagttcttgatggcaactgccgaactccaattgcggcatatgcttctcgtgacaaggatgggaattgttcattccgagggctattggcttcacctgatggatctacaggtacccttttttgttcaataaaatctatgatgatacaaaacagctatattttatcatggaattaaaatgttttcttttttttggtgtgtgatgctgcttacagtatatgagacttcgagaactggaccttatgatttcgatatcatggttgagatgggtaaagatgctggccacgagctgaaagcaaaggctggccctggcttctttgatagcttgcaatgaaaatagaaatccaccattggccaactagagtgttgagtggattattttgatttttttttgtaccctagttctactagaggattgtaccacaatgttgagctgtctcattcagatctgtatctttgcttcttttagcaaggtgagctagaatttagaacgtggttccacggttattgtaatcccttgtatttccaatgaattctggaagaggcttttgcggccaattatgttgtaactttgtaatttgatgtaattttgcagatgctttgttttcaaaataatttgattctgaaattgttgattgttgtactttagtcataagtctggtttaacatacaatctgtcaaccagagctgaacgcaatgcttcctgatacatagcactcagatgaaatatagcatatgtttagaatatttgaacaacatattaagggatgatagtgttttcccccaaaacattacaacacgtcaagtagagcgtacagtctggatcactgttcaaacattacaggttactgacatactagtacagagtaaccgatgcaggttcagagtcctaagctaaaattactcaaaaacagtactagaacatttgatgcgaattttcttgcatgtaacataagcctggtcaccggaagcagagtatccggcattcaaattctcacagctactaatctctgattcagttgggacttgacactgaaatagtagattgcttgctagattggttgatagtcaggatggttcagctgatggaaactactgaatagctagtagcttttttgttacaaatgctgcagtcatatcatgtgaaattgcagcttcatcatgtcatgaatctctgttaactgctctgattctgcattgcggacatgtaagccatctcttcagcggtcactggcttgtgcatctggatgaacagaaaggcaaaaactctagttagacaatcgtcctttcagaaaataattacgatgtcctattacgtattaccatgtcaaatgaaaggaagattggcaaaacaaattaacaacatgttcatcaaatgtaagacaagcagaagaaggcgttcgtgaaaaaaacgaagaattaaattttacagaaaagaatcaaacatcactgcatctttttgtttaaaaaaaaagtgaggcattggataatgaaggaggccagcatgtcattatttagacaagattgagaagaatgcaacttgaaagatgaaactactggtgatatatagagcatcaaacgaacaaacttcaccaattatttctgttatgtccctagcttaggtggtttgcgtaatccaccgaaaaattgagtagcatacacaagcacaacaacaaagcgcacgaactgaagaaatgatcaacaaatcctgtaaaaaagaaaaaaacttacagcattagcaacggttagcaaatgaaagcaccgcggtaggggatcctctgccgatggtgtggtatcatgattccaatatgttatgttttgaaactccgcacgggatttgaaattgctaacctccccctccagcttcttcatatcctttcctccactcctcttctccaatacataacctacacaagaattggtagaatcaccacgaacttgatcaatacataacctgcacacactcggttcaacttacacttgctactacagatcatcatgtcattactagatgtgcctagatgtgtaaattacttggtacaataccaaaatctggttctgtttttttttctaaaaaaaatccaatcgttgctgctgattcgtaatttgacgcacatttatatgaatcgattttaaaaaatgaatcaaaccaatgcaagaaacacacctcggtagccatccgggagcgagatggtggcgccctgcagcttcctcccgcggaagaaggcctcctccaccctaatcccctccacctccacacctgcgcgcatcgattcctcaaccaaacggccaccaccaagaagagaaagactgagagatgtttgcggcgaggcactgactgacctgtgtccttgggcttgaagtagtcggagacggcggcggcgccgttctgcttgatgccgcaggggaggaggtgcaccctgccgaggtcggcggccgccgtggacaggtcgacggcggccgtgacggcggcggcggcggcggctggctccatggctcgtggttgctgactagctgtggtcacactgagctaatgggccaactgggctttttttttcgctataagcccatctaggtgaacaagtctctctctctacatggagcattgaacgtgttacagcgaaaatccgaaaaataaacagcctcatcttttcgcttatcgcttatgtttatacttatcggccaaaatttaaatttttaacatcaaatttagagttgattttgaggttttttcatctaaatttagagttgatatatgtgatgccctatatatcaccagtagtttcatctttcaagttgctccatcatattttaagtttgtttttcaacctttgctttttgcttttagatcgataagaacacatatataaaagttttatttacaaattattttttgttagcaaatatgcccaaacgatggagccaaaagataggcctcgttgttgagagttcgaacgtgttatcagttactccctctttttatgttttgatttttttccttagtcataacttattaaagtttcatcgggtttatagaaaaacatagcaatatttttaacacaaaacaatcataccatcaaaatatattttatgttagatttaatgaaactaatttgatgttatagagattgctaaatgtttctatagactttgatcacacttaagaatgtttgattagaaaaataaaagtcaaaacattttataacatgaagcagagggagtttcacgctgttaaatggaagaaaacagtcatggtacaatttcagcttatttatattccacacctatgtgttctttttacattcttgatgggtcaatatgtcctatctatgtacatttcatagtagctgaatcacatgatcatacaattctctccaactcataaagcttcataccagctaagctgtgtatcttctctccagctaaaaaatcctcgtagcaggtgatttgataaatccccacatgatttggcctccttaacccacatcaaaggagtgtttactgccaggagcactgtgatattcacaacttcaaattctagttgctgtctaccaatctttcattgccgctacaaaagaaccaaattaccaagtccatctatgcatatcatgcaagctggtggaaaatattgattgataggaacaatgtagatgatcagtttgtccagctatctgtcagaggagatggcttcttctattctcctgataacagtgctaagactatgtccactttccagtgctttgacggcagctctatgcgctttcttgtgccatttcaagaggttgtaagattgcatgactgaccaacgagctcggtttgccatctgataagcaaattgagaaatatgtgtttgactacatcggtttcaatcaagatgagataaaagattaagaaacagagtgatacaaacctgagcaacagagagtgggggatccagaagaatgcacaaactcctgaacagattctcgtcattttctcccccttctgcctcgccataaacgagtgcttccgcggcaattccagcaaatagaatcatacaatatctgcaatttaagcattcgaatttagcttagatgaggaagaaattatatcgaagaactccaagtaacgacattcaagcacgatacctattttcagtacctgtcaaatgctgtgcttgacagatggccctcagcaagttctttttccattttttcatcccagaactgggtccctgcctgcaacgttagtatgaaacaccgccacttcagttctaagtaacatgtgaaggtctacataataattaaacagcatagctcagatcctttggaaataaaatggttagaatagataacccatctctacagggcaaagcaaagagagagtctaataatctactaacatggtagaatatcaatatattttcaggacaactttaaagcataatccagacagaatgaaacataccacctcatgacaactcactcttgtttataaacattcccggaggtacagaaagcatgaaatgtggatggaatagctactacttacaaaattagccatagtcactgatggcaggttactatttattaaaatctgataaagtggtaatgccatgtagcttacacgccttactttacttctaatattgaactcaaatcctagagcgaaaaagggaactgttgattgctctgtcaatatgatggataattaatcaaggagaccaaactctattgcagacctttgtagcaataaggtaatatatgaagtgcaaaaggtgtaagcccacaaaacaaagagtagcagaatacagagacatgagtgtttagcaggtacaactttctcatatctgcctgtgtggatttacactttctcacgaaagtgatagcatgagcttttataatagaaacggcaagttaccgagtgaaatcaccagaaccacatcccactaaaaaaaataaagggaaaaaaaatgaaaaaaggccctggaaattaagtgaaagaagttacactactacatgtagataattgacaagagaataaaacaaatgtaatagttatccctatacaataaaggaaaactactgataattgtacctggccttgaatgcccattcgtaatgccacaaatggatctaaaatgactcctcgtatggggcaacccattagataagctacgtgcattcaaagtgagaagtgttaggtcaacagaatagaatctcatgagtcagaaataataaaaaccacatacaggaaaacgaaagaagaaagtaccaatctaaagttttgtgttagtcacatgaacttgagacagaagagtggaaaaggttctaaaggagaataataccagtaagaagatggcctgcttcatgtacaaggatccggcgcttgtaaggaggccaaaaacatgagatttgagcaacacaggtaccaccaagaaacattgcatctgctgctactaaccccaatatggcagccaagttagcccgtacatctactccttgatttagaagataagatacacctccaagaaatccaattagaacatacgaagaatttcctgagagaccccacttctttggtgcgagctttatagctgagaaaagtaatcaaagaaaaaaaaatgagagctctacagaatacagccacagttcataatagaagaaagaaaagtcccatgaagctgctctatcacatgctgtagttgtgttgctaatgactaataaggggtattgcagtatgcatttgttaggaaaaagaagtgtggcagttcatttaaggactccaatccaatactgtctgaaaaaacatccatacgaaatgggatgctattgcaactctcaccttccaaacctgtcatctccttcaaaacagttggtgtgacttctcttggcccttccagaactgcaacaaaaaagaaatacattcacggtggtcagtgtaactaacaccaatgccaaagaaagtctgaattatatggtatcttataacaaaaaaaatatccatataaactctaaatgcaagtgagattgtgggatcgagtcttcaatacaagcacatcatatcatcaattatcaatcttagggtgccattctacaaccatttgctccctccatttcatattataaatcgttttgactttttccctagtcaaactagtaaatttgaacaagtttatagaaaaaattagtaatacctataatacaggagatttgaactcagaaccttggggtactactcaggtcactataaccactaggctatatgccctttcgtatatacaaaattagttttatgaaaactaacatttacattttgatgatatgtttattttgtgtcgtaaatgttgccatatctttctataaactttgccagacttaaaattgactagaaaaaaaataaagcaacttataatatgaaacggagggagtaacaaactgaatcccgcacccaaattatctcttaaattgcaaccaattcacattttaggaccctcaaatcacgcaccaaaaatgaccaacaacaatggaaagcgaggcccccgcgactcgggcttaccgatgttcttgcacttgccgaagttggcgaggaccccgcggtcggcgaggaactggtaggcccgccccacgagccgcatgtcgtcggcgtcgatgcaggcgtcgagcacctcccagtccctcccggggggcacggggagcgccacccgcgccacggccgcgcccgccgccgccgccgccgggggagtctcgacgtcgacggactgcaggaagcggagcgcgcgggggaggtccctgctcctcacggcgtcctcgaagtccccccactccttgagggaggagcccgcccgtacgcggaggcggaggcgccgggaaggcggggaccacctggagggggaggcgaggggaggggagaaggaggcggtggtcgccattggtgagggtgcggaggtgggagagctgccgcctgtggcggatttgcgccgctttctgaccgacgagatcacgtgaccacgacgatggtttacatgggccgggccgacaaacttggccctcgctggccttttggcccatctattcggaacatacttgggccttgagtccaacatagtaggaataagttcaccagaggtacctcaacttaacagcgagattttttaaggtcccttaaccacaaaaccagaaatctccacccctaaactaaacaaaaccgttcactcaaggtccctagacagtatatatgggtggtttcgctgacgtggcatcctagtcagaaaaaaaaattaaacaaaacacgtggagcccacatgtcagctgcatgcctgcatatcttgttttcatctcttttcttctcctttctctcttctctcttctcttctccctcctcctgctgctgctactcccatctctgccccggccgtggtacacgagatccgccgccgccgccggagtcctcgtcgtcgctgccggctggagagtgtgctgttgggggaggtcgcgccgggctcctcgtcctcctcgctgaagctgccccccctcgccgtcgtcgtctcccccgatggggttggccagttcacgtcgatcccccgcaggaatggcatctcgacgtcatggcacgccatcatcgccgtcctcccctgaccttcgtaagatccatgcacgaaactgagtcgccaagattgcaacatgcatgcacgcacgacatcgacgtagtccgtccatctatactcaccggaggaggaagaggaggagaagaggccggcaccgccgttccagccgcacagctgttgcagctgcggggcggcaccacgggaaggctcgggtgaacccgagcccgggaagcgcgcgcggatgaggtcccacgccaggtcgacgtggcggtcgccagtggcgaggaaccgcctcgtcccgcgctgccgccgagtcagggacggacgcggaaggccaagtgtctcctcgtcgggtgtgggtgctggtccacgagggcgcggttcctggagtccggcgccgagcacgacattgtcgtcgcactggacggtgaggcggaggcatcaatgctgctgctgcttttcgctcaatcagatgattcaatcacattcactgctactttccgtaaaaaaaaacattcactgctactcgagatcaagacttggcactactcatcgattaattaacttgtactcaagacactgatactgatcaatcaatcaatcaatcagtggttagtgctcgtccgatatagaaaggcaaaaggcgtaggcaagaacgaggagaggacggacatgaggttgcatagccatcagaaaaggaaaagagacgggagagagagagagatcacggtgatggccggagatgcggaggatggtgacggcgagagggtgcagctgttcgtcggccaggtgcccagctgcatggcggaggaggagatcctcgccgtcgaggcggccacggcgtcgtgcacggcgatggacagcgccgtctcgtcaagaggaagatggctgggccccgcgggccggatgccgccgtcgtggacggcgcgcagcggaagcacgccgccatcgccgctccgcccgccgccggcctcctcactgaataagggaagagggaagagagaaaagagaagagaaggagatgaaaaaaacgtgcagctgacatgtgggtcccacgtactttttaaaaaaaaattgctaagtaggatgccacgtcagcaaaaccacctatatatactgcctagtgactttgactgaacggttttgtatagtttaggggtcgagatttctggttttgtggttaaggaatctcaaaaaatctcgctgttaagttgagggatctccagtgaacttattccaacatagtattcatgattcaattcggcggagaaagtccatttactcgccctcacttatagcccgaagcccgattctgattttcatccatgaacaacacaacagtaaaactacagatatcgaagcttccacaatataaatcgatgccaattgactcctttaatggtttgtgaaacaccaggaggtggtgtggtggtgattaaatttattttttaatcagttgttaccctgttctttattatgtgagactgttttttaacttttgttcggggttagctctcgtgctcctgcaagtgttagaagtcaccttgccatggcaatcagatgatcaaggagaaattttattttaaaaatgtgaaataaattaccaagtccttaaatttaaaccattatataacttagatatatgaaattataaattacatgtttgcgagtatattgttggtttaacgtatcacagcagatccattcctcgtttgactgtggatggctgccgatatggcactccacgttaatacaaagaatgtattcaagtgatgtaaaacttacactaaacctcttcttgctatagggttgaatcccctttcctcaacgcatgaattccccttgttcacggtgaaatgtactccatatgatgtactactacattaatctaaaaagatatgatagaggcgtctcgactggaaaagtttggaagaacatagcatcgattccaagcacgcaagctgcgaaacaacatgagcccaaaaaacccaattgtccattaatccatccatccattttcgttagaattcagccatgttgatcagggcaacaagaagacgaccgcccacctcaccatttccacgcgccgcccccacctttccagaaccttccctcgtcccaataccgtcgaatcctcgccgtcgatccccaatccgtgggcccaccacaaacccgcaggcgccgcatcttctctcttacccccgctccaagccaaaccccacctgaaccaaacccactgccatctgggccccacgcctcccggccccacatgccagcgacgcggagatgcgaatattccccccctctattctataaagaatacctccctcctccatcgccgcatcacatcgcaatccaaaccttcgtcttcgtcttcctctcgccgctgattcgattcgatccgatccgatccaaggtgagttccctcctccgatcgcgcgctcgatcttggatccgcgggtgcggaggattgctgtgtgcttcgcgggatctcgtttgacgctcgcggggccggatttggtgcaggggaggggaagcaatggcgacgaagaggagcgtggggacgctgggggaggcggatctgagggggaagaaggtgttcgtgcgggccgacctcaacgtgccgctcgacgacgcccagaagatcaccgacgacacccgcatccgcgcgtccgtgcccactgtcaagttcctcctcgagaagggcgccaaggtcatcctcgccagccatctggtcagtgagcaccccctgccatcgatccttgaccctcccgcgctttcgatctgcaaagtggcatgctactttagatttttttgggttctaggggtggatgatatttggtcgctagtactggaaggaattcggatcggaagctaccatttgtgtagatatgagtaactttgtcagggttgtagtgatcaacgtaggattcgatatgatcgaggcaaaggcggcccaatttttaaaatgaaaatcgatctcttatttgtttgtgttgtttaaatagatttgcattatgacagactgacataacggacttgacttaattaatgaactgttagacgaggtactccagatgtgctactgtttgttctttattgtgatcagtgcccgaaatgaactttgattgtgatgacttggaccagtgcattgtttaatgctcttgctgacctttgtgcttgccttccattttggttgggtaccatgactatctatttcttccattatattagtacgtttttaaattttggatgactaataagagttgtactagcataataatataatgaacattaaaagtattcagcatggaggtttgacctttagtgtaatggggtaattaatgggtttgatgatgattgtcttgtcttctgttgttttcagacaatgcaagttccttgtctataattgatcatcaaatttttgtataattgatcattaaatgtttgttaggtaggaaatagtggttaaacctgatcacagagacatgtcaagtttgtgcttctgcatttcacatgtatatttcatccagcacttatatctgtttcatttcactcacaagcacttatatctgttccatttctctcttgtgagtgttgtttcatggattggataacatgatggcatagtggtctgataaccaaaacttcacttttttgggctaaagttttgtgccatgagaacctccagtagaatatatcaatttcaggagtatccaaaccaaaacggttatgttgtatattgtacaacaagttgacaaataagcaactttgtgttgtagcttttatatgcagaagagtttataatgcttgtggtgcgtactgtgaacaaaacagaatggattactaatcaactgtaagctcttaactgttgcttttcattctaacatgattcacttttgtaacctccagggccgtccgaagggtgtcacccccaagtacagcttgaagcctcttgttccacgcttgtctgagctacttggagtcgatgtatgccattggatgatagctgttaacagttaatttttgttattgttgaactagacaacagctcttgtattcctctgatctatttgtgtgcataaataggttgtgatggccaatgattgcattggtgaggaagttgagaaattggctgctgctttgccggaaggtggtgttctactcctagagaatgttagattctacaaggaggaagaaaagaatgatcctgagtttgccaagaagcttgcagctgtcgctgacctctatgtaaatgatgcttttggcactgcacacagagctcatgcttcaactgagggagtgaccaaatttttgaagcctgctgttgctggcttcctgatgcagaaggtattgccaaaatgaagtctccatcctggtcaatgtttgcttaaatatatattcctagtaatacataggtcccgtggtaataactcataattaggaattgaattcatatacattattcacctcaatcctcaaccaacctagtttgtattcatttcaaagaagcaataccacccttaggattggcaaccacccaatagtccaccgaagagtttgttactttaggagtaggaaataacatggaatattagagagaagtttataagtaaattaatatttttttaatcttcaatgtattctccaaaatatgttgcataatgcttatttcagaataaaaaatacaactgtactgatatggttaattatttcaggaacttgactatcttgttggagctgttgcaaacccaaagaagccatttgcggccatcgttggtggatccaaggtctcaactaagattggggtgattgagtctctgttggcaaaggttgatgtcctcatccttggtggtggtatgatcttcacattctacaaagcccagggatatgctgttggaaaatctcttgtggaggaagacaaacttgagcttgcaacttcacttattgagaaggcgaaggcgaagggtgtttctctcttacttcctaccgatgttgtagtggctgacaagtttgccgcagatgctgaaagcaaggtttgttcatttacacagttctgcaaattacattttgctccttactaggaaactaaagtagttttaaatttaaaataacaggtggttgttgatgtatttcatttcaagcatcatacaagtaatgatcgattaatatattggcatttcagcctccatcatgatatcataaattcgaaaatgtttgtccctgtggatggcaacatccagtaatattcatggtgcatagtactaaattattacaaacttttatgtccgttgttttgatgtccactataccatcattttcagactgttgctgcctccgctatccccgatggttggatgggtcttgatgttggcccagatgccatcaagacttccagcgaagcattggacacctgcaacactatcatttggaacggacctatgggagtctttgagtttgagaagtttgcagcaggcactgatgttagtacaattgactcacatccgctgatctcctgcattttctttcttttttctgtcgctaaacattctcgtctttcatcaggcaattgccaagaagttggctgatcttactaccacaaagggcgccacgaccatcatcggtggtggtgactccgttgctgcggtcgagaaggctgggctggccgacaagatgagccacatctccaccggcggtggtgctagcttggagttgctggaaggcaagaccctcccaggtgttcttgcccttgatgaagcgtaagctaattcggcttgtctccatcagcagtctgcacttttgtttcagacctctcggtgtaactttgcaatgtcaatgcttgtatgaagaacttgagataggcttatcgtcaagttttgctagatgagtcgtgaataagcttttcgacttcctcgctgccgcgagtgaagtggttcgaactgacatacatactctcatggatcgatattttgatatgcggttatcacatccctatgatggcatcatctgttgatattgcccgatccgctgtggtttatctttgattttacgtatgattgtttgctgtgcgcatttatctgggttgtttttttacgcagaaatctgctaatctattactccctccgtttggattttgagtttttacttgcaacgttagaccacccgttttattcaaatttttttaaattgttatttattttatttgtgacttactttattatctacgttactttaagcacaacttaactttttgttttttatatttgcaaaacaaaattgaataagacgaatggtcaaacgtcgcaagcaaaaacttgaaagtccttatattgtgggacagagggagtacttgaaaacatgccaacatttttaacacaacaaatatattatcaaaatatatttaatgttacatctaatgaaactattaatctgatgttgtagatgatgttattttttttataaatttggttaaacctagggaggtttgactagataaaaaatcagaacgatttgtaatataaaacgaaaatggtatacattgttatgaaaccgatcttccgaaggagtcggatttgtaggaccgtgatcgtgaggatcacggtacctcctccttctattattctgtttccttattaatgaagtgggcttataccaaatatatatgtatatatccatataggatgttcttttgtttccttattaatgaagtgggcttatatcaaatatatatgttattaatgaagtgggcttataccaaatatatatgttatatgtatgtatctatataggacattctattgtgggtataaatacaatagtgaggttgagggcaaagtaatacttgtaacagatagagaaacatcaataaagttgattgccctccactttcgtgttcgtgtgtgcttgttcgattgttgacaacgtgaattctaatacgttatcagcacgaggtgctcttcagccaaggtatattgtcaacatcgatctgtcctaatctcgttctatagggataacgataaacttgctagatcgttttctgttatttttatttctccgctaatcgttcgatcgatgggttgtactacgtggatttgtcccttatggcgcatgtagcaggagagtttgcggctctccaccccatgcgcgacaggcgtatggggttatcccttgtacaaccgatctatcaaacgagaagcggttatcgctatagtccgattagatctgttcccagcctttgcgctgggtttcttttcttgcaaacaaatacacggataccgtacgccctagacgcgcgaatggatcagacaagccgccgcaagaatgacggtttagaactagtgatgcctcgaagggcgatgctacgttcagggtgtaatcgcgatgcacatgagaagaatcgcgtacctagctaacgtgattgccgattccgaacgaatcggcccaaatcctcatgccagcgccgccgtcctcctgaagttgacgacgacgaaaccgagtcgatgacgcccgcatgcaccgtcgtgccctcgccgccgccagcacgcgtcgccggccacccccttcaccaatggccgcagaatcgtgccatcggctttccgtcattggttcgcccttgaaaagccagccgacgggtcttcaatcgaccgcccgcacttgccgtaaacggccgccgcccgcagagacgctgaggagaccgcgcccgcatccccctgccgccggcacgcctcccgcgctaccgcacgcgactgggacgggggtcgaagccgccgtggcctcccgccgccgatagctgtccacctcgccggcccgcatgccgagccaaattccgccggcgcacagcaaggagctgcgcttgccggatgccggatatggcctgtaaccagccacgccggcgttggtgctacttgtagcctcaccgccgctccgcctctgtcgtcaaccccgccgcgccgatgagtcccatcaacctcgccgcctagcccgcatgagccgccaggatacccgccgccgccatcgaatcggtggaattgggggctagggtttcaaccctagccacccgattggataaggtgcggcgcccttgttgggccgcatatgggccaaggccattagcaggccgacggtcccgacgggccggttaacctttgaatagccggtacatagaggtaggccgagtataaattaggcctataaaaggagtcgggctcgaatcaaaatttggccccaaacaggcaaacttctgaatatgtccttgaattttcaggatacacgcggatttggaattttagcggaatagtccctcgggattatagaaattacagagaatatcacattttttgttattccgtactttcaattttctgtatattaactgtttattagttaatttttgaatcaaccatagaatcctaaagacatggtttttaggaaatgaactctcataatttgaaatttagtacacaccagagagcatcatatttatggtttattttcctagctgttttatttttttttcaggatactatttaatgggttagtaattcagtaattactttggtacctaaataaatagtacagcaattctgagaaatgttgggagaattatgggaatatattgacacagtactaaatttggataaccagacaatttactatttgcacacttgtcatgctcttacttgcagtacttattgaattttgcatgactaatgtagaaaaatgactgatattgctaagagagattttgctgaactagcagtcagcggcaagaattacctaacatgggcactggatgccaaaatcatgcttggtgctaagaaactcctgaactgcattcaggacccaactattgcaacatcagctggaggagttaataatttaccaacttcagccgagaaaaatcaggcactgcatttcctgaggcaccatttgaatactactctcaagaatgagtatatgactgaggaagatccgaaggtcctttgggactcactgaaggatcgctatggccatcaagtaaaggctttgctcccaaaagcaaaacgtgagtggcttcacttacgtttccaggattacaaatatatggagcaatataactcagttcttcaccgcattgtcacttttcttaagctatgtggagagaaaatcactgatgctgacatgatagacaaaactttgtccaccttccatgccaatcatgtgaatattcagaggcaataccgccaggctaaatacgagaagtattctgaactggtctccgtgctcatggaagtgcaaggagaagatgagacacttgttgaaaatcatacgtctcgccccaatgaaagttcagcaacacccgaagcaaatgctagctcctttaagaagggggaaaaccaaaataaccagaacaaagggaagaatttctggaaaaatggtggtaaagttaacaagatgtctttcaagaagaaaggaaatcacagtaagtctaagaaaggctctactagtggtgaatatggaaagcaagatcaggtatgcttcaagtgtggcactaggggacactggtctcgcatttgccgcacccctaagcatctcattgagctttatcaagagaagcacgggaagaagaagtcagagcatgagtcacacttcactgttgagatccagcactcagaggagaagatggctgccatgcatatcgacaagcatgtcgatgagaaggcagtggttgcaatgcacatcaatgataagatggaacaaaatgcagcagacgcagagctgaagctctcagatgatctcatggactctgatcagttatatggggacatttaagtcttccaatttatatcttagcttcctacattataagttactttaaattttagactatgtaatagactaaagttaggtgatttttcaagtgtgcatttagtttgtgttcctagcagaactatagtttctgtaagctccttcagagcaatggttatcttaataattgagtgaactcttttagtttaatatattttccagatttttatttttctatcttaaagtgttaattttttctatatggtcatgaattgattatatttaaatgctttatgatagaacagtgttacgtactatggcaatggaagaggagatgtgtctggtagactgttgtaccaccaatactatctttcgagataccacgtatttccagactttaaagagaaagactggtcaaatcgctactattgccggaagcaatgcacacatcgttggagtgggacgagcaacagtagttctcccacatggtaccaagatcattataaataatgctctgttatatccagagtccagtcgtactctactaagctttaaagatatccgtgctaatggttatcatgtagaaaccaaagatgagaataaactcgaatttcttctcataacgaaattagacggaaatcgtaagactgttgttgaaaaactcccttccttgaaatctggcctatactacactcatataaaacccgaaaatgttgcactgaaaacaatatttaaaaatcctgagtcatacagaatatggcatgacaggttaggacatccaggtctagggatgatgagaagaatcatctcaacttcaaatggccataatttacgaactaacgatttcccaaaccaagaagattttgtttgcactgattgtgcaacagggaaattaatcgttagaccctctaatctaaaggtgaacgcagaatcaccagtattcttgcaacgaatacagggagacatatgtggaccaattaatcccatgtccggatcattccggtattttatggtattaattgatgcatcaactcaatggagcactgttttcttactttctactagaaactacgcttttgcgcggcttattttccaaataatccagttcagagccagtttcccggataaccggatacaatccattagaatggacaatgccggggagtttacctctaaggtatttaatgaatattgcatggctttgggaattaaagtggaacattctgtaccacacgtccacactcagaatggtctcgccgaatcattaattaagaggattaagcttatcgctaggccattgctactgcatagcaacctaccaactacatgttggggacacgctgttttgcatgcagcggcgttacttcaaatcagacctactgcatacaatgctgtatcccctatgcagcttacacgtggatatgcaccaaatatttcccatctgcgcaaatttggatgcgctgtatacgcccctataccgccacctaagcgtacgtcaatgggtcctcatagaaaattgggaatctatgtaggatttgaatctccgtctatcattaaatttttagaaccattgacaggagacctacatatgggtcgatacgctgattgtatatttaaggaagatcatttcccggcattagggggaggaaagtacctacagaaggtcgaatgccgcgaaattgagtgggaaactaaaaatctcctacatttagatccacgtactaaggaatctgaccaggaagttcagaccataattgatttgcaaagaattgaaaataatctgccagaagccttcactaacccaaaggggatcatgaaatctcatatacctgttgtgaatgcaccggaaagagtagaaatacctcatgacgcagaggaaccggttttcaaattaatttctacatctaccccaacttctaggaagagggggagaccaccggttgcacacaaccaaactaaagtttctaggagacgtcctatgaaacaacagattggatagaataccacagcaccagagaatagtgaaggagctcaccaggtagatgagccacctgcagtgatatgcccggatggcaatgaacccagtgagaatgcgcgcgcaattactactagcactgggagaccggaaattcctgacttaaacattgcgggaaacaatgaagatcaggaatgtgaaagaatagaggaaatatccaccagttatgtggatacaggtgaaacatacaatagagagactactattgtcgacatatactttgccgaaaagatcgctaagatcattgatctggatccagaaccaaagtccatggcagaatgcaaaaagcgttcagactgggtcaaatggaaagaagcaataaaggcagagttaatctcgctcaataaaagaaaagtattcggtcctgttgatcgtacccccgtagggatatcccctgtaggatataaatgggtgttcgtccgaaaacgggatgagaacaaccaggtagttcggtataaagcgagattagtagcacaagggtttacgcagagacctggcatcgatttcgatgaaacctattcacctttaatggatggaattacattccggttcttaatatctatggcagtcaatttgaacttagaaatgcagttgatggatgtagtgaccgcatatttatatgggtcattggattctgaaatctatatgaaagttcccgatgggattcaagttcctgaagaaacaaaatgcaacatatacagtgttaaattgcaaacatcattgtatgggttaaaacaatccggtaggatgtggtacaaccggctcagtgaattcctagaaggaaaaggattcatcaagaatgatgactgtccctgtgtgtttatataaaaaaaaatcagaacatggattttgtattatttctgtatatgtggatgatctgaatatcatcgggaccacacaggtgattaaggaagctagttcttacctaaagacggagttcgagatgaaagaattaggtaagactaaatattgcttaggtctgcagcttgagcacactcatgaaggggtattgttacaccagtctgcatatatccagaagatattggagaaatttaatatgaaggattcatatccgacgagaacccccatggtagtaagatctctagcagtagagagtgacccatttagaccacaggaaaataacgacgaattattgggacctgaatgtccatatttaagcgccattggagctttaatgtatctcgcgaatggtaccaggcctgatattgcatttgctgttaacctacttgcaaggttcagttcggttcctaccaaacggcattggaatggcattaagcaaatcttccgttatttacgtggcacacaagatatcggtttattctttagaaaaaaaatcaagatttgaccatggcgggatatgctaatgctggatatttgtcagacccccataaagcattgtcacagactgggtatgtgtttctctgtggtggtacagccatctcatggaagtcgacgaagcagacgatggtcgcgacatcaacaaatcactcggagattatagcattatttgaagcgagcaaggaatgcatgtggttgaggagggtgatacaacatgtactgaatagatgtgggctgaatatcacaccaactccaaccattatttatgaagataattcagcttgtgttgcacaaatacaaacgggttatgtgaagacgagtctcacaaaacatatatcgcctaaattcttctatatgcatgaattgcaaaagaaagaagaaatcaaggtgactctcaccaagactagtgaaaatctcgcagatttatttactaagtctttgccaactagtgtttttgagaagcttgtgcatggcatcggtatgaggaggatgagagatttgcacaaatcagggggagcacttccctgactgtgttccgttgatattgatcatgcagatcattacatcattcttgaagaatgatagagttatccagtagattagcttatggttgtactctttttccctttagtgagttttctttgaagtttctcacatttaggtttttaatgagacaacagtgcaatataagtagcgtgtactatgtactctttctcctattcatttttctcccactggatttttggaaggagttttgatgaggcatatgtatagcgcggtattcgcccaagggggagtgttatgaaaccgatctcccgaaggagtcggatttgtaggaccgtgatcgtgaggatcacggtacctcctccttctattcttctgtttccttattaatgaagtgggcttatactaaatatatatgtatgtatccatataggacatcctattgtgggtataaatacaatagtgaggttgagggcaaagtaatacttgtaacagagagagaaacatcaataaagttgattgccctccactttcgtgtccgtgtgttcgtgtgtgcttgttcgattgttgacaacgtgaattctaatatgcatgatttaatttgttctgttattggatcaccgactgaacctatggtgattgatggttgtagttgttctgtgctgaattgcagtttgttatcgatcatagttgtataattttattcgagcaagcaatcaaaggtatgccaaggatttacaggaaggatccagcaatacaaagtttaacctatccggttaacctatatccagtactataacagaaggtgaagcctggtgcgccctgaatgaataagaaatggacaactgaggtcatgcttgcatgaaaaaacacctgaggttgataagaactgaagataataagttaaatgtcgattacacacctgaagttggtaagagctgagggacactgccccctcactgggcccatcatccaagcaactactacttggtgaagcctggagcttaactaaccattgttcattggtgattggtgatccaaactatcaaaatttagctgctctgctaactattcatctctgatatttctcttcaggaaccataatggagatcaagtttttttttgttgtgttttgtgaactcattttttagggaatgcacaaaagtccgagagaaaaaaaaaaggagaaatgagttgtgaactcattttttagggaatgcacaaaagtcggaggaaaaaaggagaaatgaaaaaaaaaaagcgagctgctcaatgtaaaatctcacaaaagtatctggaatgtgttgccttcaggttctgaattctgatggtatagttgaaatctttttccccaccatccgattgtctgcaaactttgactcttcattaacaaaggcgagtatctgccataaaaaaggcttcataacccgtgtaatatataaaaaatactttgactcttccacactagatttccaaatcgacataaagatttgtatgctagtaattttcatgctactcaaattccacttgcgaagggctttattctcatcgagcttgacctttatttttttagaaaaaaagcatcgagttttacttttcttttgatattattcttacataaattcctactccatggctcttttacttcgatatcattttttttgtctacttacttaccagcgaaagacatgtctttaagaaattttccttaccatatgtaccaccaaatcaagctttacagccctcttatatttttagtcaacgtgatgtttttatccattttcagcaatacaaatccctaaagttaattaatcagcatcaagttaatggaaactgtgttactttttcagccaactgcacagctttgctgaaaatattgctaccccaccacttaaacatgatctagatggccaaaatgagccacaagtaatttgtgaaaattaaaattaattgtcaagttgagctcataatgcaatattagtatcaatttaatgtgctaataatatggccaaaatgaaccagaagtaaattgtgattacaaaaatatcaagttgagctcataatgcaagagtcgacttccatggaacgtgcgtgcaattgtgactgaatagggagcctaaaggagtagcatgatgtatgtctctgtcaagcacaaacatcataatctaattttatggtttactagtgaatgcagtccatgagttgcatggccttttggaggcaaggaatataattgcacatgaacatattaggttaatctgtacctaattgtagttttgctcagcagcatgttctttccatgctactatttaccgacatctcatttcagggtgcttattttacttgtggaaatgacctgcctttttggatatatgtatcatttttgcaaatttttgtctgtgctatttgactatgaacattgattctgtgtcctcaggtatttcacaataattgcgtcgtctaagtattttgcatgctcagtagtccccaattggaattttccgcaagattttatcagcactgttaataatgtgcaggttttacttaatttacagtagatatagtactttgcaagtttattgccaattcaaaattatattttgttctttcaccatttaattggtagctttacattcttcatggtatgttaaatcatggattaactttcattgcattcaccacacacattttgttctttgaagaagctaacattttagacaaaagtaccacaattctacttctgaagtgagaaaaaaaatggtttaatatccaataaaaatattctattgcaaaagttaggaacttgaatttcgtaactgtagcaaagttggaagacatttagcagaattactgcacaaaatgatttcaagaggacaagaaataaacaacatttgaaactgtgtatgtgacaaatgatcactggttttccttcctttctatagttctattccactaaggatcagcttgatttaatgggttaagctgcttaagaaacagatatttccatgcaacttacacttcaaaaaaaaatgtttacatgcaactgaagcagatcaatacttctgtaaattatacatatgttatatgcagtgaaaaaggcgagagaattttgcatgaggcaaagcttttgcaaagtagaacaaaagcaaaatcacgcagttctatgaaaaggagaggacaaaatcaaactctcaaaagaaagagaaacaccataatgaaataaagatctaataaacaaacgaaatcgtacaacaaggtgagagatagcaaatctaccttgttttcatgatccatcataggacaacaaagaaatggagaacttgcacaatctccttcggatcttttgttggtggtgagagagtgaagctgcaacatgatctgatggagccaaattccaatcactcccacctcttactgaaactcacaagaacaatcataattctacctctactaaccaagcccacacctcctatcaccaatgctcatcaagaacccgtaattcccttcgcaagttgacacgacgaaaaacctcgaaaacgcggtaatttcagtaccaccaacaccatggatagatttggctcatgcctgacaaccagatcatgctggcagcttcattctctcacaccagcaaaacttcgttcttgcaagaacatgagacagacaagtaatacacacaggaaggagaaggagaggaatggagaagtggccattggcatgtactactactactgataatatagcagcagtgggcaaaggagaaggaagaagagagacaaaaacagtggcacgaggtgtgtgcaatatggttgtcacaagcatacatacatggtccctctcctacctctcacacctcgtgacactgcctttctttgccatcacaaccactgccccctactgcaaatctgcaatacatgtatgtatgtatctagtgcttggtgtgttcactgtcccagtactgcttatctgatttttttttcttcaagtgcaggtggtgatcaatcatgttgctgtttgccaatttttacctggagctggaaaaaggctgaagatgataccagtattatgtttattggtgcaaaatctttcaagtactgcagatgatcaatctgaattttaaggtggagatgaaaaccctgaaatgatagtattcttggtgcaattcttaggtcaatttttacaaggttatatgtgctgatgatcaagcaatggaagtagagtgttagacagactaaatgttcagaaaattgtcgatgcaaatcttgttttgcgtctgaatttgtccagggacagaatgacagatacattgatgaaactgaaagatagtacagcgtacatgtcgaggtatatggcgtttgcaggagcaattttgtgctgctctgaaacactgattttgcagcacaataaattggtaccaatctgcattctgacgtacactcgcctactccatagcgaacatctctgaattttccacgaagacctgttcttctttctgaagaacaccccctgaatccttctccatccttatcaatcgctcaatttaatttcttttcttagaacacgcaaaatatctgctgcataattgcattagttagaaatgttacttgatcagaaaacaaatttgcctaccattataaaagaaacataggaggtcaacaatggagcagtgaatttcccaaacaagctgtgcatgaattcaatcatcttgctttagtgggcaataatttcattggactagactaattgtctgacaatgatggcctaacaacctaacatgaagcttggaaataggacttgagagcgtcttaaatgctaatgatgatggtctaatcacatcctacaacttagagctagctgtccagcttaacacaaactgaccagtctttctgaggttcagtgttagagatgtttaaacatacatagttatgcacatgcataatcactgcctgaagaaaggcttcttcttctctctctctctctctctctctacaaaatgattgattattttctagccagagaaacaacttattaacagtttagctagttccatgatctgaattcttgatgcttccaaatgtaaagtaaatgacaatgttattctcaaaaaagtaaatgacaatgtttcactaatgaccatggatttgcagcatgtgaaatattcagaaaatgtgaggaatatgcagagagacagcaacaaatcatatcggcttaggatttactcgaagatgaatctagcctctgctcatgcctgtggctctgaatttgtctgaacctggcaagagatgacgacatctgcacgattacagatttacagttactgtcacgccctgcatacacatcggacaagagaattgaagccggcctggctggacaggaccatgcgaaattgtctgaatatgaatatatttgcagatgcggatgcagccagggtcaatgcttctttccaagacgcctgcttaatttctgtccgactgtacggccggaacttattattaaccatcatttctgaagattaaccactgcatttgcaagatttataattactcaatgaatcttcctttgagagatgcagttttgatcttaggttgttgtgcaaacgagcaataaatcagcttagttccagcaatcagttttgatcttagctaaaactgagtgggcagagatcaataaccaggaatcagctgcaaattaaggttgtatttgacaggaaagaaaatgagaaaattgagaagatatgtgaaatgagatgagctattagcatagggttaattaagtattaattattttaaattaaaaaatggattgatattttttaaagcaactttcctatagattttttaaaaaaacaaaaaaatataccatttagcaatttgggaagcgggcgtgaaaaacgagatatatcttctctctatctgctacccaaagcaagactataactaatgttacaaatttctatggatcagtggatgtggatcacacgctaaattcttgtgtgctacccacacacgtaataagttagtcagctgaacatttcaccgtcatagtgtcgttccttaagcatgacataaaggagtctcctttattcatatttaaagcatgacatatatcttctgacattttgaaggactttggcaccaaagagagcaatatgatcatatggaaaatgtgatatattttttatatatatagttgttattggttagggttcataggggtaaatatcaccgggagaatagccgggcggtgacgaccgctaggaatgaaaaagggacttaggatatgggagactaattctgattcgtcgcttaactagaatgacaatacaatccatccttatatagatgtagggaaggatccaatttaatcatttgtaacaaactctatccaactgagctaccataagatgagggaaccgttccctagggatactagggcctcaacctcttggaacactaactgacctctcgacccactacctatgatactacatcattccttttgagcagctcgagattacatccctcctttcaagcagctcgtcctcaagttgcagcacgacttggctgactcagacaactaccttagtaaaacctaacatgatgcaagccttttaaatcttggattcttttactattttgaaaggaaattaaaccaacgattatcatagatcgttgcattatgatattgtcttcagttgttagtcttcctcctggtagtaaataaataccatcgggagaataaccgggcgacatggctactagggatgagagagggacttagggttgggagagactaattttgattcattgcttaattagaatgatacaatatatccttatatagatggagggaaggacctattctaatcctatctaacatactctatcaagtgagctaccgtaagatgagggaaccgggacactagggcctcaacctcttggaacactaactgacctctcgacccgctaccatgacactacatcattccttttgagcagctcgagactacatccctcctttcgagtagctcgtccacaagttgctgcacgacttggctgactcagacaattacctgccggcctcctcactaaagaagagaagagagaacagagaaaagagaagagaagaggagaagaaaagaaaagaaaagaaatatgcgcagctgacatgtgggccccacatacttatttatttattttttgttgactaggatgtcacgtcagcgaaaccacccatatatactgttaaggggtacaagtttaggggtacatatttctagttttgtggttaagggaccttaaaaaatcttgttgttaagttgagggatctccggtgaacttattccttcctcttaacttttgttcctctacttgagctgagctgcaatgtacaagatgggccaagatttcctgatctgatgctgtgccactggacttggctgggtcgctctgtacaagatgggccaagatttcttgacattaaaaaagaagggactagctaggagctccaatgttaggaataagttcactttgtgaccctcaaatgtgatcgaaatctaatctgtgaccctaaactacaaaaccggatatctcgacccctcaactcttaaaaccggtgcaatttgactcccttagcggttttggtgctgacgtggcacctacgtggcgatgttgactcagtcttcggtccacatggagttaacgtggtgcctatgtgtactagaattaaaaaaatatgtgtgggaccatttgtcattcacacaaaatgtgggacccactgacatgtggggccatgggccctcttgccttcttcctcttcctccacccttctctctctttttctctctctctcatttctcttcgtcttcgtatgcaggcggtggtgggcccgagcggccgcggcggctagcgggaggggaggaggcgacccggcggcggctcggcggcagcagcggcgtgcggcggtaggaggcagcgtgtggcggcggtatgaatcggacgtgccacctttaccaacaagacccaaggaagggagtaggagggagttggagacggcgacgagaaggaggagcgcttgagccaccaagaactccatcccaatccctctccctctctcagctcctcacactctccctctcaccaccctcctgcgaaccaagtagtggcaaagcagagtagtagtagcagacactgtagtcacacttaaaagcgcaacagttgcagcagcagcagagcagcggattcaagttcgtggttgaggttgttggagtgtataaagtgaattgcccacctttccctatcagcttaggcttttaggtgcaactggctggtgcatgcaacttaatatggtatcagagccagaggtctcgagttcgaatcctggctggcgcgcaattaaataaaataattgcagcccactccaatattccacacttgagacttgagggggtctcgcgtgagggggagtgttgaagtgtataaagtgaattgtccacctttccctatcagcttaggcaggcttttaggtgcaactgactgactgactggtgcatgcaacttagaggtgactagacgctggaggagtttcttgcttgctgggtcaaagcaaaaagaagaaggctgggaatgccattaatgacggtaggattcttttgaggataagcggcggcgacctggcgtgcggcggcggtatgaatccgcccgacgagcgcaggtggagcgcgtcgtggtgaccgaggactaggagatcaagggcgtcgtactccgggatggcgcatcacccggtgatcggcgtctcctcctaccgccgcctcccctcccctcccgctcgccgccgcggccactcggaccctcgagcgcccgccgccgcctgcagacgaagaagaagagaaataggagagagaaagagagagagaagggataggaagggaggaggaagaggaagaaagaaagaggactacatatgggccccacatgtcaatagttatacattattattttggtgtgaatgacaaatgggtcccgcatatattttttcaatttagtatacataagcgccacgtcaactccacgtgtacccaagactgagtcaacatcaccacgtaggcgtcacgtcaacgaaaccactctccaaaaccaccgagagagtcaaattgcaccagttttaagagtttgggtcgagataaccggttttgtagtttagggtcacggattagatttcgatcgcttttgagggtcacaaagtgaacttattccccaatgttagtacaaggagaaggagcattctctcaaataaaagggataactttttttttctcgtatgagaactgcacatcattatatattaatattaagaagggaaagaggaaaactaatcagcattctccctcaaataaaaagggaaacttttttttttctcgaacgggcatcctgcgtagctgcacatcatcattatattaaaaaggaaaacttttgtgtttctttggcaaacccattttttatttttgcttgtttgagtccatgaaaaggaaaactaatcaacaggacgcatctacataaaaaagataacaaatcaatagactcacaaaatgttaaatgtgaaaccactaatctgtaacatactcatgctgttctaagatataattaattcatttcttctaaagtatcggtacaggaacaatgtttatcagtaatcctacagctgctacacctgaatctcgctgaacgataatgagttttgactgctcagtcaaatctaccaagaactgtgggactgtacagaccacgtacaaaatgacagcagatcttgctggcagcagttctagcagaaaaacatggcccctttcaaattatcctttataggaagaagactgccagtctctgaggctgcgctgctatcttcttcagaaggcaaggaggtgtggctcgttgaatcgccaatcgagcgtggtttaatgtaacatcgagctcgtgatgacagaagacgagcgtagtgcacaggggccactgcagagtgcaaaagaagaaaaaggtgtgaatatatatcgtaaccatatatgcttttgctagaggaaaagcacatttcctacagtaaatgatagtaggagaatgtgggggctcgtgcttaccaactgatatggattgggtgcaagttgcggagctgcaataataggtgacaactcgtccgttaaaccggtcaagggatttcaaaaatgtaaaaacacataacaagtggcattcttacgtgtagcagaggtagtttgtgagctcttggaaagaaccagccaagaagtcgttctcgtcccacagaacatgataatacctgggccgcttagttccctaatgggaaaattttgaatcagctaggagcgtgttacaaatgaaaaaaaaagaaaaagaattatttgggtaaagaagaactaagctcaacctgcgtgctgcggtggctacacaagtagaaatcaaactgatttggttggcaaatatttgaatcaaccacagtacctgaagttggacaaattcacaggggttaggaagaaggttttaggtttgacaagataggcagtacagcaaacaaaaattggcaactaaccagcccgtatgtttgcagttgaatcatgagtattcgcattatagtagtcagcaaacagacgtgtatggcgacacttctggagcaccacgtatgtaactaatggattataatcgggtcccatagatgcacacgcctgtttttatggcacaaatttatcatttcaaagaaatagaatgcagtgctcatcacaaaaatgttcagaaagaaaatgtgggataaaaacttcaccattttgatggcaccaagttcgtgcatcaaagcctgagggagctgtcctttgctcacaccatccctgaagagagcagtcgtggaataatgtcaaatatgtagacatagaagagatgagtccggccaggagtgttctctgtatgattctatcacctcggtgtaatcgtttgtgatcaataaagctcccttatctaaaaaatgaaaagaatgaaaagatgaggcaattcgccagacatagattaatacctgtaaaatataatccttccgggcttccgtttagtggctcgatagaaagacatgagatgctctctgcatataagacaaaacttatgtacatagactacaaagacctttcaagtatagtattcacatgctaaaaggtaacacaatcattcgtacttgatcattccgctagttgtggttcctctttccggatcatcctggactttaaaaagaccttgtattgactcctggtggcacgcttgcacactgattaaaccagcatacttggtaacctcgggccagtcttgagaagcaacaacctgcataaaacatgcaattgctacatatagcacacatatacacttaaaagttatagataagcaggactcctgcctccaggcaacggcgtcttaaatagtgagatgtgcacttacagcagcaatggaagaactattagcttttcctggatgtggatgggtgacatgagcaccaaatacaatagttggtgtatccctaacatgggggagtctcatttctaaagcatcaaccagtacagtatttcttccgcccatctacgtacacaaccaaaggaataaataaggacctgatgaatgaccagtcaagcaaatagtacagcacaacaaaccttagcattgattttaagggcaacgcttgcaagataccacttgttcatcttaagaacatgttttgcaagacaacattgagagatcagtccaatatctgtctcacatattcttttgacatcacctgtggatgacaagtacattaaataaaaaccattaattgatcagtcaatgctcacatgtattacataaagaaactgcccacatgtgttacaaagtaaaaggtataccataaagagatccattgttgttaggcaatattacaatcagcaggtcaagttttctgccctgtggtctaagtatgtccatgacatcgtcatgaagtgtcctgagtgcagattctacacatccaggtttagcaatcactagaggaagcacaggtttaactgaaaagacctacattgagacatagggaatatgaaaggtcaaaattgtgaataactgtgaggtaaaaaaaatggaatcaccttttgggtcatagagaacctaccatcccagattctcggcacataaagccaaggtcataacagaaattcctagcagcatactcccgtacactccagcaaaagttaacacatgcccagcttttcactctcccaccattgatcattttctacaacaaagcattaccataaaattaatttgcagctgtatgcaatattgccaaagatagaaacttctgtaaaatataatcacaacagttctgaaaaacaaataatttggaaggagaaatgcacaatatatgtcacctcagtaccttatgcatcatattccatatgccaagttgtggcaagaattctgtcgtctcgccactgtcatggaatttaagctgatagaaaaagaaaagtcagacctacagcataacacatgcaacagacatcgcaatcagcatatgtaaatgactgttaagacatacccaaggagcaggtaggatgcgagatttaattgatacaagtttttcctcaattttaatgccaaactctttagcatgtgggtcctcctggtatttgttctgatgcacagtctggtaaccaaagacataacatgataagaaaatctagagcataatatgttcttttccaaaagaacatgataactaattacatgtaaaactggaaactttaatccgcatatggtggcctactttaaataatctgttttcatattagaatcgcacctgttaagcaaatttgggttgttgatatgccatgtcaaatgcatgaaaatagtcaatggccatgataaagaaaactgaagcctgatgatagtagataataaaacttcaagatcacaaaacaaattacaagtggtgcgacaaacagcttattttcatatggacaagaaatatctgtgtgcacaatctcaaaaatctaacaataatgaaaaatgtcactacaacaaagaacacaacagaggtgcatcctaaggctcatacaagttggttcccttcaaagttcaaattaaattctgaggtaatgtgttagcctctgaacagtactttgaggtaaatgttcgtttacctcaatatcattctttaagccaagccggggggtatgcaaatttgaggcaaccggtttagccccaaatacttttgagtcaaaccaataccttttgccttcattcatgttagtataatttttatgttccatctaatataaaaggtctccacccataagacccatactcactctgaggcggagtggtagggttgcctccaaaaatatttttaaaaaaaatcagtgaaggaccactctcctcttcccaacacgtatacatgcacgtattcaagcatctgctatggtggctctaggagttaggttgtttgcgaaagggcttaggtgccacatttagatcagattatgccagtttatactcctaaatatgtatgatcttctagtgctcactgctcatgacatgttaatagcataacataaatcttgtgcataaggatgacagcatgatcaccttaagcacatcctcatgtaggtcttttgattatcatcgaaaaaaatccatgatatgacatgatatgatatttataactaacttgtggaagtttgcagattgaactgatccacttaatgttattgacatggctaaaatatttaaaagaaatcctaaacaaacataaactgaatgtagaaatttttgtatcaggttacctgcagaatgttgtagtcacgctcattagggggctgtcgagctacctgaagaagagcagccatatgttttgcattgagctgtttctggtgacattgtccctcagcaattttacagacctagaatacagaaggtgataagaagcagtttttataagacgatagtgtgtgtccattcttaatattgttggatattgtagaataaatgttcgctcaggatactaacctccaatggcagaaatattgtctccccaaaatgagccactttcaagcaaggcaaagatgggtactgaatactaaagttaactggaaaactgttgcaggaaaaaccaaaatagcattaacctattatcatcatagatggcctatttagagcagaactatagacacaagagaatatttttatgtgtgaaagcaagtgcatacagtaaataccttgctgcttgatggacaaggtcttgtacatgatatgtgttgaacaaaatgccattaatctgaaccttcagaccttctagagcctccttaatctaacaaagaggggaaaaaaagtgaatcttgtaatggagtgaacacaggaatttaaatcaagtactaagtaacagaatagcaatgatcagtttgtgattaaataggatgacaaaacgacctgaccttcaagaactcagtgctacataatggtctgtctaataagatgtcctcgttaagaagctgtgcaacatagtcaaccacaggtacaggcttgatgaacactgatgatgacacgtctgcaatagagtactaaacttcctcaagacatggaaaaagaccagaggcaagttcaagacgtacttatcccactatatgatgtatataggaatacagtgaacatgcattcttggcccttagcatgcataaaatgctagtgagcttattaaagtagaaataaaatattattcccaaaaaaaagtagaaataaattaggaaaccttaagatttctgcaatgtatcatacttcatattgcagcttcaagcatttacggaaatggtacaaacatgtaaccatattttatactgaacggtaattattgaggacatgtgttcctaatacacaacatatgaaacggtttcaatatgaacaatcttacggttttcttcattaccacttgtaccttattacttataagaagttcaactcaatcaaagcaagatcaatttcagaaggggcgacatagaaattctcattctcaggtctgaaatacaaaaccacgatgaatagttgggatctgaccgatattcagttgaagtcccatctgagtagcttgtattctttggtgaaaaccacgccagctttccaagaccttacacaattgtcggcattctcctaagttaggtgagtaaaatgaaccagcaaattgggtatacctgaatatgcaaaattattgaatgggaataataataatacagaaagacggaaaacggaacacagtgagaacgaaagctaaccttgcagtgggtaattcctttagaacaacgtcaagtgctcgcagggccgctcgactttctcggtttggcttcccaccacggaacttgcgtaaagtccataaggaaatttttgcagcaaattttaaagtgaccacaaaatctctcactctcaagtgccttgactcttcaggactgtcttcaatactatccagcagaacaagaaatctatgtgaatcaaatggcaatggaccagatgtgtatagcctcttccttccatcataggcaggaagacggccacccaaaccagaatctttctgctgttttaccaactctctaataacagcacgattgattccaacctcaggagtgacacatacctgataaaaataacatcagatacgaatactaatggcgcaaataaatttcatgttatagacaagttatgtgaatcagaaacttacatcatattcatagatagtctgatcatccaaagactccagatgaacactgaaacaatttgtcctcacaatgcaactttcgccaatcataccttctgaagagagatttggacgttttgctaatctataagttgatagaatggcttgtctttcagctttattatgtttcaaggagtggtgacgatcgtagagccaggtcattctctgactctccatgactaatgttccaaggcaaggtacaaactttagcactgtaagcggtaagaatagcaatgatcagagactgaagcatcaagacacatcgacagttgaaaactagagtggcatcatcaattttcacgaacagcacagcattgcagtgacctccacacttgtattcacaacagcacagggaaaagcaaaaggtacgatacgccgttgttttcaggtaaatgaatgaaggaagataaaagggattgcccgaccagaccaatatatgcactcgaacattgggggaaaaattctatctaaagagaggcaaacacgaaatcgatccccccagagctaagatgaaggaagaaaaacagtaaaggcaaattgttattagtattaaggttagggcaaatttacagaacagaggctagggtttaacgcaaattcgagtagaagtgcgtgggtagagagagagatcggaaagagcgtgtataacggatgggtgctcaccaggatggatgcggcggaagcagcaggacgaacgacggcgcccctgctcgctcgcgagatggataggaatcggcggcggcgggcgaacacacgagcagtcggagtcgacgcacagcggacggggaaatattcgagcaacgatgatttcgtaatctaatcggtacgcactggtatatttatttaagcaccccagtaagtcacatgaaaccatacttcctcccacccagaatataatcacttttaaacttgtatactgttactccctccgtcccataacataagagatttctgtagatatgacacatcctaatacaatgaatctgaacagaccgtctgtccaccaaaaatcgcttatattatgagatagagaaaatattaaaaaataggtataattaaataaagagagctgtgattagataagaagtggagatatgtggaaaaactgaatagtgaagagttgtgattagctgagaagataatgtctgttataaattatcaaacatttgaacatctgcatgaagtattaaatataggctaaaaaataactaattgcacatattgcgactaatttatgagacgaatcttataagcctaattgctccataatttaataatgtggtgctacagtaaacatttgctaataaaggattaaattcatgacaccccttaatgtcattctgtagaaatggggggatgagatttctcaaaggaaaatataacatgagaccccacgtttatttttctctgtaaggccatccccaaccctccatatcatctattgtccatagcatttaatacattgccacgtaaacaaaactatgatgtggcaagagagttaatgatgagagatgtaaaaaaatgaagaaaccatttctcatgcaagaaatggataggtggatgaaaagagagagaatagagatgattggatgagaatttaatttgaagacaccatccattggatagatagtttctatacatagtatctatattacatgacaagtatggaaactactgtatagtttctggcttggggatggtctaattgggtagtagagagcaagtccataggttttttctcaaatatattcttttttttccaaaggagctaatagggaagcatttctaaagattagaatcatttagattttacttgaaaatagttcagtccaaagaagccctaaaatagagaagagggccggtatgatttgtataacatgagcccaaatgaaaatgattgtaagcatataagataagattattgttatctaggattccttcattccaatttcgaaacactcactcgtctatatttcctgtattatttatcaattctttattttatacgtgtaattttatgtttcttcgtatgtttctcttctcatattttgggcccctttgaatcgcagggttaaaaaaacagaggaataggaaaaatacaagattctgataggaattgaagtgtaaaacagatgattgcaaaacacaggaaaaacacaggaatggtcgtttgatgggaacgcatgaaaaacacaggaatcgaatgagagatagactcaaaggaaattttccaagaggttggagttcttgttatatttcctccaaaatccacatgcaatgtgccattccataggaatttcatgggatttggaaagcttcagagccctttgatttataggataagtgtaggaaatttgaaggatttcaatcatatggaaaaaaaaatcctatgaaagcctttgaaacaaaggattgaatcctatactatcctttaaaattcctatagaatggctaatcctatagagattttggaggaaagttagcaagaggtccaacctcttggaaaaattcctttaagtctatctctctcattcgattcctgtgtttttcctgtggtccaatcaaacggtcatttctatgttttaactgtgttttccaatcctctgttttacacatatattcctgtcagaatcctacgtttttcctattcctccgtttttccattcctgcgatttaaagggaccctcaatcctttgaatcaaatggccaaatagaaattttttctatatgatttgaatactatataaatcctttgatttaaagtcactttgtttttcttctgatcaaacagggtctgatggaactactgatggaacatccctggatccctgaccatactactcccgtccgtgaatctctcctcctctttttattgcagggatccatgaacttcaacccctgcagttaatgcaaaagctttgcagctttctctcggtcattgtgggagtagaaatggatggtactgctgagtcaaaagttagaaatgcttatactagtcccattctccgaaatataaacgactagtctgttcataaattaaatataagttttctatagtaccaattttccaatccaactcctacatctgccccgttttatagctacttttacccattgttagtattaaaggtaaggtaaaaaaatatttgctactgtattgtataagtagtagttaagatgatcagtaagtaggtgaagaaataaaatgagatatttgttatgacaggtatgtagagaagtgtatatatttaagacaacatttgaaatgctacaagttgatatactaggttgtacctgtattatttcatgtatttgttgcttcattttaattatggtcaagaaaactaatgagctgtcaaatctcaaatgtataaaggtagtctcaccgtaaccttaacctcttaacttaatctctgctaaaacttcactggatattttgccttgagaagtgttcttcattttgtggaacctcgaggaatgcccatccaactatagaaaactactgtatgatttgttgtgaataaatagctattcgagggtacaactgaattatttaaatattataaagtttgaaataaatttaacaaagtttcctaataaatttatttttatatagagagagtaatgtttttttatgaaaataacactgtttatggggcttagaaaacatgcgcattcatccacggatctactccctccatcctaaaaaacgaatctaaaactatatgtgatatattttaggactacgaatctccaaattcgtaaaatgtgttgggttggttttttataggactaaacaccctaaatccgagccgcgcatggcatggcacattggcatgcacgcgcccttccgcgctgcaccgcaccgatcaaacttttcacacgatcgaactctccacacgacgcgactgcgctagctaggaaaaagctgcaactctgccatcccaactgcccccgggaagaggggtgagagaccaatagatcaaaggatgatgcatgttttaattgactactatttgcctcgactaccattctgagggggagtacgcggaaagaacttgttgtttcctgctcaattaattaaaacaagacacgatattgaactctatatattaatattaacttgaaaaataaaagaaactaaagcagatagtgactaggaaaattgtccacaaaaagtaaacaatgaaagatagtgactactccctccgtttcacaatgtaagtcattctagcattttctacattcatattaatgttaatattgatgttaatgaatctatgacatatatatctatctggattcattaacatcaatatgaatatggaaaatgctagaatgacttatattgtgaaacagaggaagtaggaaaattgtccacaagaagtaaatagtgaaatactcctacgaagtaatacagtgaaaaaaaaacagttcattacttgcaaggatgcttgtagaggagacgtcaaacaaatggcgtagaaaaatgtatatatgttcataaacccttttttttacagtgattttttttccaatctccacctccttttaattttctgaagtcttttcttttaattaagcaggaaagtagcttttccttcaatgtatcttctcttgtttagtgttagtggaggtgggtcccatgggcaatggaaacatcattgatccattaatggatggttcagattgaaggtaaggcaaattttgccgttgggacttgggagcaaaggcataggatgcggatcctcatcgccggtgtggatgtgtgtaggtgtgggcgtgtggctcaggttactattttgtctatggccctgtttattctaactttttttttcttcgaactttaaatttttccatcacatcgaatttttctatacatataaattttttctattacatcgtttcaattttttcaaactttcaattttagcgtgtaactaaacacaggctatgaatctaagcttcgtttgaaataacttgcatgcagacgcaatgtaccgtgtgtacaccaacgaattaccagttttttataggacaaatgcatgaattttttttatgtttaataaagaaatggtatcagtgctaatcaaggttttaaaacacaagtactgtacctggtaagaccggttttaactggacacatgtttggacttgaaattttcagttcaaaaaatgttactcgtggagcttttttttttttcaattttctccaaaacttggtaagactaaatggaattgtttagagatcaaacatatgtgagggtgcgttctaaagagcttatccggttaactactctctcatttctgaactgctaaacaatatttttttcatatattttctaatagaagtttatttataaaatcaaacaaattcatttttttaatttataatatttcatactcaatttaccatgagcgaaacatatgttgtattttccgcgccactaaatctacacattcgaatccaaccttattgttgagcaaattccttatgtacttgcatttttgtttattttttttatcaaaacacagtgagggaggcctccatggtatatattaataagaaaaagggtatatacaaggacggcctaagccaaaagagaaaaaaagaaaaaagtggcacagaaatatatattaataagaaaaaaagaattttcatttatttctttctatgccttaatttttttttgctttattctctacatgccatcgagttttcattttgatttttttctatactcattctgttaattgaccacaagtcgattgttagattttttttaaaaaagtgactatatccctcaacgtgaaaaaatgatttatgtgaggaaaaaacaaaggggggcataattatttgaccataaatttaaaatttgaaaattttaagtatattttaaaccaaactggacaaaatccgtacaacatcttcaccatcatttttaaaactattaaaaaaacaacatgacaaaatggatacaatttcaaaatcgagtccttgtgactgcgaggggagcagagtggcaacgggggccaagcgcggtatgctggtctgtacttgggtttcccactttcccttgttagcaaaaaaacaagcaagaaaaaggctgttcgcttcatccgcgccatgtgtctcgttaccaagaagaagagagagagagagaagtctcctgcaagccttggggtggtggagggtggtgtggtcggtgtttggggttttgggttctctcctcctcctcctcttcctcctcctctctcggcctctccccatcccagatttgcaaaccagttggagtagtcgtcgtctacctagggtggcaggacaggaggagcaagaaaatgatagggatgggggagggagtagcgatggaagctaagaatcaaggcaaggaggaggaggagaagcaatatcgaaaggaaagggtgtgcggccccgatcgatcctccttcccacccccacctagctctcgcgcgtcgtcgtctcctcgaccgccggcgcccgtcgcgcgcgttcgatgatcgatcctgagccgttgcggttgcggttgcggttgcgcgtgcgtgcgtgcgtactgcgtgttggtctcgcctcgccggccggcacgtgcgtcgcccggcgaggaggctccatctttcgtcgccgtggagaccacgccgcggcggcgcgcgcgtacgtctctttctccacgtttctttctgtgtagtcttgtactaaccaagaaatgatgcatccaggacgtactatggacacgaatcgagctccgggaccgggaggaggagaaaaataccggccgccaggagcacgcgccgctcaatctcacagctcgggaggaggagaagagaaataccggccgccaggagcgcgcgccgcccaagggcacatcttctcgggaggaggaagaggtgaacgccggccgccaggagcactcggcggcgactggcactcatcgggaggaggaggaggcaaataccggccgccaggagcacgcggcggcggcgactacgggcaccaaccacaaccagaaccaggattgcatccaccggaaagaggggggagcacctacttccgaaggccaggagtatcaggaggaggagattggagaagcaaaccggaaggacagacaacaacaaggacatggtacagcctcttccatctttgagtgcaatcttgctcttgaatcttgaagcatgcacgtactcactcgtccgggacgtcaaggatgcagctttgtttcttcgtcttaacgttggccacctctttgtttgtatatgcagggatgggttctcgcggcgacgggacgaggaaatggattggcggcacagtcacagaggagaagggattgccaatcctactgaatctcctaccgccgacatgcctccaggttcatatgcattcctcatactctgtcgtgcatcaatgttcacatgcggatccatcggtctgacccgcgcaaactctctcccataaaaaaccaacctagtaacacattactttttccgtccttgaaaaaccaacataatattggatgtccaaattcatagtaatactataatttgtcatatccgacactagattggttttttatggaacgagggagtatgcgccgcaaccgtaagccgctcagcccccgcgcagcctagtgcttagcgttttaatttaacttttatagtaaaacgataaataaattattaatttggaattttgaaaatgagttgaatgttctaagttggagttgaaagtttgaaattttgaattgaaaggacttagttgcaaaagtatattgatgttatatatattagagaaatgctacagaactgtacacctgcttcaaatgccaagattggattgttcttaattgttatgattgtgtgtgttaaatgactggtgctgccttgaacaactataaacaaaagttggctgttgtactctgtgtgtaatagtaattcaattttcttattgccatttggttatcaacaacaaatgcaccctttttctgttgttggttggttaataatctagatctacattttacttatgcagtttcctatgcaacaaattaaaatctgataattttgtcacaatatatgttgttgtataatgcagttgatcttggcctactaggggaaaccaaaaaaaatactgttcactgctgttatcatttttctttggtagccagaactttgatgatgttgttaggctgcgttcgtttgtattagatagggtgagaaagcacctcgttttccgtgcgcacgcttcccaaactactaaacggtgcgttttttacaaaaattttctataggaaagttgctttaaaaaatcatattgatccatttttgaaatttaaaatagttaatacttaattaatcatgcgctaatggctcacctcgttttgcgtatctccccaatctcctactcctcaaacacattagttgtctagaagtgagatgggatgaccgccattagcctgataacagtttgctcatctagcttattttctttttttttcctgtgttgttgccagtggcagagcataatggaggtcaaactgcgcagtggcccctccagtgttttcaagttgatgtagatagtaatatgtgcaacactgcaacatcctagatttgataggtaggttagctggcggatgtctcatccctgagaattaggggtttgattctacttattctttttttttccttttaggacgtacatagattatttattttattttcacgctactaatattttcttgtcgacattatactatattttacactttttactaaaacgtttacatttttaaatacctgtcctatagtaagagaaactttgttttaacttttgatattttgaacactctttacatgcttatataatgtttcccctcttaagtttatgtcaagctccaccacggttgttgctattgatgttgtttgtcggagaagtgggaacaagggttttcactttatcatatgcttgggtcactatgagccccactttgtctcaaggggaagatggcgcacggcatcaacctttgccccaagctcacgaagatgacctgaggaagacaacagcccgtggacaagtccttcagaccccggggctgaaacgtctaacctgggtggattagggccccgagcccccgaggatagcagcaggactcgaggtctccccgaaggaatctggcccattaagaggatttgactaggtcttgtgcgttattttatcctatcattttgcattaattacggggtgatacaaatcttgtgagcttatcataggcgacataggagatgtggttgtgcatgctgcctctcacgcgcccacgtcaccttggagaaaaaggtttgcgatgtgccacgccctcaactatcaccccaagccctccctgtcagcttcggtggttgataggtgggcctagggacaaataagatgaagactttgcggccttgctccagatgttagctagtaggtgagcccattccatccgaccggcctacttggagggacagcgacaagaccaagcaaaccaacccttgtgtattgggtccctctttcatatgcatgcatgggcattgtggataggcctgctaataggttgggtgggaattggtataatggattggttttcattttgggtagaaatggtctaacgaagctgttgggttggggcagtttggactttgctgaaagtggattggatcgatctggttttcggtcatatacctttgggtccaaaatgggttcaacccatggattttcattgaatcgtccccaaatcctctatgctagcttgatggacacactcatcttcctcgtgagcacaaggatgcccaaggcatgcccgtcggcatgcgtcgtcgtcgattcgggcttggacgccatgcgcgttaacttcaagcacctttcaaccatgaggtagttcgaggacctcgcggcgaaaatcttagggagaaaggagatggtgcgttcgtaggagatcttcgttggcgacaagtacaagcagcaatagtccgccgccacactcgctttcctcatggatgcaactaggtcgactatgacgaacatccgagaaaggagagcatcgactatgacgacatccgagaagtagcctcgagcggccagaaatcatctatttgctgggaatcaggcgccggcaaggacaactcctcgaagatctaccacttggtgcgtcatccacaagacgaccaatcactcttttacggactgcaaggtggtgcaacacgtgagagctgaactcgaagcctgcaaggaacggggtattcagcgtgcttcaccaaccaagaccacctggtgtctgatccataagtcaagactcaagaggacatgagctcttaggctgcaaagtcttccttgacgccaccaaacctccacgccctcagatccaagaacgacgagttcaaactcgaagcgttgcataggaacagagcccagggagctcctgaccgtttcgggattcattggtatggacccccacgaggcctcggttttacatagcttggaggatctagagtcctcggcacctaatactctacgaaaggtgaacgtaatcgagggagtagtccgagtaatcaaaatccaactgctcgggcgaccacagatcccatctgtactcccgccaagcatttgaacacaatcaactcaatattaagatagagcccttttgatccggtcatgttccctgatggcgggtcgaacgactacgatccacaatggtgaatctcaatagtgcttttgcggcggcgactggacctccggctcaagatcctcctcaactcccagctcgaggagaagaggtgcacgtcgacggcagtgtcgaagaagaccccaacgaacattcgagctgagatcctggtcgtaacctcccaatacctcacctcgaggacctcgtcaggggaccccacccctcaagataatcgcgatttacgtgaccacttgaacgggcgccgacgggaacgacgagaacaagacaacgctcaccgacatcagcgccgttcacctcgacgcaataatgacgacaaccgagcgttcactccaacattgcgagaaatacggtggatcgaaaaattctaaccaggagcgatggaagcaccgtccctgaggaattcctccatgtttattccacggttctttacgctgctggagcagatgacaatgcgctcgcaaactacttgtcgtctgtgttgaaaggatctgctcgatcatggctagttcatctcctaccctgctcgatctcagttcgtcgccaactttcagggtacatacaagtgccacgcgatcgaggaagaccttcacaatttaactcaacccaggtgaatgtttgagggactatattcggcggttcaatgaatatagaaatctgtctcaaaggaatctgccccattaaggggatttgactaggtcatgcgcattactttaccccaccatttcacattaattgcggggtgatatgaatattgatagcagaccacatacaatgtgagaaacgtggccatgcatgctacctctcacacgcccacgtcttcctggagaaaaaggtgtgcgacgtggcacgccctcaactatcaccccactaccccctccccctttgttagctttggtggctaataggtaggctgatggacaactaagatgaagacttttgcagccctgctccacatgtcagccgtttggtaagcccgtcccatctgaccagcctacttggagggacagtgacaagactaagcataacaacccctatgtactgggtcccacttccgcatgcatgcatggggaggatccatgtctctgagaaaaaaaaaagttcgactccctggagtagactaagttcatacactcccacttagcacattccccctacacctgttgtaaatcttgttcatcatcacatagagtaagaacataagagtagggtattacgcttctcagcccgaacctatataaaccacctgtcccaccttctttctcttgcatcctggccacaagcttagaacctgcaccttggccgaactctgaagggaaggtatcttgcattcccactagaggagctccgtgctccgacacgttgtctagaagagggatgagatagcgccattagcctgataacagtttgctcattgagcttttttcattttttcccctgtgttgttgctatttgtaaagagatcttttacagtgtttgcgaggtacttggaggtggaacaacgtgaaccattgataagagaggggcaaggtacggaacaaaaatattgtaacatgatggcagtggagtaattaacttgtaaaacatgggcattatacgttaattgaatactaacatccatctgtcagtattcagatcggtaagtcagtatccagatcggtaagccatcagagaaaagagtaaatcacggatatcaatccgattgatccgtaacagatcgcatctccattcttctttcccttgggttcgttcttgttctagggtttggatgtttcactggaaggagacaggttcgccaaaaggagacagagagaaaagttttggcatggttgagggttgaagaggagactagatcgcctggtcaacgtcaacctaacgcatcggtaaattatcctatgcttatttacagagttgattaattatttatgtatagttcataagttccttatataagggatttagaatttttgtcaatttgtggtatattaaacgagatcttctccaatggtgttcttctagtgttttaacgggtgtacccacgaggagacacggttgaggaagaagctctggtatggttgagcgtttgaacaggaggcaagatctaattgacatgtacaggtgtgtgtataagtaagatatcctatgcttatttacgtagttgattagttatttatgtagctcacaaatttcttcgtacaagggatcaaaaagagatatcctaatatgttcttcatattagggtttgaataggtgaacttgcttggtgacataattgagggagaagcattggcactgtcttgtgtttgaatatgagacataatctgattgacacgtacgtaacaagtgcataggtaagatctcctatgcttatttacgcaattgttatagtttttaccgagttcatggatccctaagtttacttgggtagggcctgaattgacacatattgaattttcttatttacatagtttagttcttgttaatgcagtgcactattctttcgtatgtaccgcatgcaaattagttgtacactaaattagcttttgtagatttgtttatacaaagcaatttgctatgtacaatttgagttaaaattataaattaactcaagatggtaaagggtgttctaaaaattaaatgttgtttcttgtaggttttaagctctgatggaggatacagggatatcggttgaggaattgttggagtaccaacaaattgtcagcaagacattcaatagtgaggatgaaggaattcacttctacaacaagtacgcttgggataaaggctttagcataagaaaatcatatgctgaaagaagaaatgccgcaaaagaggtcaaacggaaaagaacctatgaccttttgttgtaaaaaggctgttgttgatgaagtttgtctgacatatttatctagcgggtatgatattggtgtttgtgagcatgctcaccatgagtcagactacttgtgttgatatgttgttggttaacttgacatagcatgttcaattggaggcaagtatcataaattgatgaaatgtataatttaaattgatgctaaccttgggtgatattttaactggtcatgtttctgaaacacaatataaatatcttgctagaaacaaactataatttttaacagaattaaggtatgagttgtcatgtgttcgttggaacaaaatgtaaatgtagaaaaaattcacataattaggctacaaacgtattataacaatacaatgtaaatctagagaaatctacgcaaaagagaacatcaaagaacactacggtgacttaactcgaatacaacgtaaatcttcaagaaaccacgtaaaagatacgctgataccgtgtagagcgtacctatgcggtacctattataatttggaggacaattctacccttttcactctactagcaaaattatatttttaccattagtacctaaatacctatattaatacttaaatacctttaacatggtacctgtgattgaggagcgttggatctttaccctttttgaaatgcaaacaccgtaaaagttctcatttgtaaaaacttatagtttttgttaatagaaacagggggaggtcatccctcttttctcttaagaaaatgttgatcagggtagaggtagggtagaaggaccagatgccctacatgttctctaagtatctcttgtaattttccaatgagtaacgctaataaatcttgcttcgtgacacttgtctgtgaactattttatgattttattagacaagttaacccatatatctaaaacattgggtttgccctgcagttgatccagagaagccatggcatgtccaaatgctggagaaggaattcattgagtggaacgtgccacaacacttacgttccaccaatgatcttgtcgttggaggagttctaatagcatacacaatagataaagaagatgacaaatctgaagagggtggatctgcaaacctcattaatggcaagatgtccttcctggtagaagataaaccacatgacattctttgctcttttctgctcgtagacagtctggctactgcagaaagttatcaaagttgctcactaaaagttaaccacaaaagagttgccaaagcatatttcataggctataacagaagcttatgcaagtattttgtctgttatgagcggctgaaccgcttctcctttaaagaggatagaatagatcaccaacaatctagcagtgaaaaaaaacaacagccaaaacaacgctggaggaaaaatatcaggtaatgtcttacccatagattacatatgatagatctagctcaggtaaaaaaatttaacatacaatctattttgtagtgaaatatttgaagccttggaagcacttcatgtggcgggatatggaaataactatatgaattcaaccatcacttttgcttatggtcagggtaatgatcaggacaagctactgaagatagtcggtggatgtcccttgccatgtgatgatactagaaccaaaaagtctcagcgagtgaaattttgcacattccttcgaaaaatcggggcagaaaatacacttggctatcaagcatttaaggtgaccgtacaatacgggttagtaactaattactccaaatttcatttttgttaaaaaaaattaatgcaagggctaaagaaaccacttatatacattcctaacaagtttaacaattaaaattattagctctaatcactactcaggataaaagagtagaaggtgtatgcactagagtatttattatcatatattacaaaatcaaagacctttttttataggagtatggctgtgtttagttcctcctccaaattttttttgacgtatacaggcgtacatttgaagtattaaacgtagactaataacaaaataaattacagattcgacctataaaccgcgagatgaatttattaagcctaattaattctttttagcaaatgtttactgcagcaccacattgtcaaatcatggcgtaattagactaaaaagattcgtctcgcaatttacatgcaaactgtgcaattggtttttctctcgtccatatttaatgctccatgtttatatccaaacatttgatgtgatggaatttgtagaagtttgaagggaactaaacacagcctatatgttcttttatcgggctagccactgacctgctacaataacacgtttttacatctcctgttacaaatcatctaatagctcaaaactagctaagcagttcacgtagcatgcatgcacttcactttagtaaatccaacttgactactttctcaagaaaacaactaagtttttcatatatcttgcaccttttcgatcgtttcaaaaccatccatgtcttcgctttgttggcagtgatgacgtcgaggtaatcatgaaacatccatatatcttggcctcggataaagaaagagtcgctgctattgagcccatgaatgagagattgtatgaccttgctgagagcaaacgtgtcgatctaaacacttctctcaagcaaaactttcgagactgggtgtggcagtcgatggtaaagaaaagcaccaaattttctgttttcctctgctcaaaccagattaattgggacgattatgatgacagcctggtcagcttggtgagatttctcagaaattttgttgagcatcagcgtgacatcgccataggacggcatcgctttatgtatgctggttcgagccagactcgagacagagtcactcgattgtctctctcaccactattttctttcacatcttcttccctgttagagcaaacaacatgtaagatgtttgtttatcactggcccaacctgtaagatgttttgtcacttcatttatgctacgaaccttgttattttctgttttaactaaaatacatctttccaatcaaaatgccatgtcataattatcatcctccaatgaccgtgtacgtgtacgtccggtttggatataatccggttattggaggacgataataatggcattgtcatttagagaatcttttaaataaaaacaagggtcatgaataaaatcggttttttaaataaaaagaaaaaaaaataaattaaaaaccagacttcattcattacccttgtttttatttaaaagattctttcatttagtagtcgctcactgtgagacacctttcatcatacttgtctgtttattccgctcaagactttattcagtagaatataccgttttggagaaaatttgcagaaatatgtgtaggaatagaataatatacttggtattttggtaggtggcaaaatcccaagttgcataaacaagttaattgatactccatgcattttactctctattttttgtacgggacgaaaaaaacatatggcaatcatatagtctcgttcaggaagcaaacatacaagcccagttcaacaactccttgagagcttcatgggatgctaatatttcctcctaagccaaaacgatttattaggagataaaatttttatgtatttgtttgtaacaacttaaaagccaatgtaaaaagagattatgttaaaagtattataaaatcaaccttaaaaatcaagcttgaaaatttaaattttggttttcaagagtcggtttcgtactggcttggctgggtcgggctcgggctgggccatgaaaagcagacgtcgccctccaactcctcctcatcgtaaccatcctcagtaaaagtagggcatcgatcagccgcgcccaccccaatctcgctgccgcctccaccgatcgccggcggcggccacccacacccaccgtcacccccaaccccaggcactctcgctccaccggtcaccgggggcggaatttgctcgtttgtttgtccgatccgatggatctcttcatggagctgaaggagcgccatgattacgtccctccagaagatttcatcacccgagtgttgccgcccgaggctttcgccgacagccgtgacatcccggagtatgaggtcgcgttcatcagagtgcccctgtacgagctccgtgaccccgtcgacaagggcctcatgaggaagcgcattgaggagcagcggcggcgggaggcggagagacggcggcagcttgagaaggatatgcggcggtgggaggaggaggaggaggaggaggaggcatggccgtgggaggacgacgacgacgacttcctgaggatgtcacaacagctgtcagtaatctgttcagaaagccgtgggaagagaggggattggcctaatatgaaggcaacaagaagagggagaagaagaacacatgcattaaccccagacaatgaggaggaggaggagaatttgagtgagctggagctagccgtggagaacacacggcgcaggatacatcactgcaactgcaaccacatcccgcgtcacaccctcttcacgagccacgccgatgtggaggagctcttcctccctttcaagctggaagagccttacctctgctttgcctcgcgatgccagaagtctgcgccctcctacgctcacttcttccccgacttcaaccgttcaccggtaattcaataacttccctcccaacaatttttactcttgctgcctgacattgtgcataaatatttgactagcatgttattgacacttgcaagcattgtttatatctctatttaaatcttctggcttgatttcgtgctcgcggcattgcaacatatctcaaataattaaatcataggttctgagtttagaaaagagaaaattccaatatatattgctgtatcatctacagctagtagttgcacatacacatatgcaaacaatataatatgtacttagctaaaataaaatacaacactcccatatatcaagaacctaggactggatgagacatttcctagtaatacgaatctagacagcttaggaaatgttccatccaatcctagattcttatattttgggaaggagggagtatcatttactcccactaccttgtccaactaattagcatatatattgctacatgtcaacaattaataggggtgaaaatgctactgaattaccctttttatcagtataccattttcatctagaatttctgaaaaaaaacatattgtactgataacccatgaaaataattacaaaaaaacataattccgatagttctgttctgctatattctgatgttccggtaacactgacatcgtttttgtttctgtctctactcttttgatttcgtttttgaggaaaaaaatgtttttccaactgttttcatcctcttaacaataacatgtgttccctactattgtagcgtataacgtctgattggctgcgtccttctacgtttgaaggggacctacaatatatcctattctttcacaagctgatggataccgtggagtgtggtaacacagaagatacagttctagccaaagccatcaccattgcaacacaatcttatcagaagatgctgtacttccaaattgaagctgctgtgcaagattgcttggagcttcttaaggaaatggagaggatgaatgatagatacgacttctatcatttcattgcatctgagatcctcttcaacaacaagtcatatgaagatgtgctcaagcttatacgcgatgggcatgtagagttacactacacgcttaaagagttcagcactccccatgctgatcaccacatggatgatttggtttgtgctattttcaaatagacaatctaatgctcttgtgcctataatattcatatttgtttgacatttgtttgtaggttcatcgccttgtgggcaggactcgtgcttatgtatgtattattgtatctaaatatttcctttttttattttttttcttaggagtataaaatttcgtctcctttcattcatccagatgcccacagatgcacaacgagagtgtggaatgttcaaggactgggtgtgtcagcaggttgataaggaggtaacttcgttttatgccaaatctattgtctatttttgtcgcataatggtgtctaattcttttgtttcttctgtccacagtatggatctcttggttatctttacatgcattttcttgataacaagatgagagcttggtttgccccatttcctgaaggtaaaattctcaactaaatttcatccacaatgaaaaagtaaaatctattcccttttgaaagtatacgatattcctttttgagggaattctaggatattctgtgccattggattgggtgcaatagtctcagccaccacctctttttcactgcatgaaaagtaaaaaaattgcacctacaaaggttcttgctatgccatctttgttgatgcttgttttcacaagcataaattttccatcttgtgattggataacaactgcatgccactaggctcttcttgagtaatggcaaattcttgttcttgagaaattggctattatccaatatatgattggaaataatgatttatttttctgttttcatatatacaaaaggcaaaaaaattacatattggactctttgcagacctcaattccagttacatttggcgtgctacagtcacatctataaatcgaaagtaattgcgcacaataactgagccaagggaagagcttattatctagatatgcaaaagtaattggacaaatggtgatacgcagaagcacccataaatttgtttcagggtgccactaatttgaatggttctagatttttcatttgcatggttgagcttcattgctgcctgtcaaaacacagctgcagttacttatctttcgtgttttccctttttcagtgctgaaggatctgaagtactctgaaactcatgaatgggttagtgttgaaggcgattatgcaacaattgggatttcagatcatgcccaggtacatatttagatgttctatcactctgagcatttttttttttattttagggcctcagtgtgttgaatgatccatttgcttcactctatgcatgtacacagagcatgcgttctatttcttaaacgttattaggtccaacatatgttaccatattcagcgtatagaataagggcttgtggttcttaagtttattttattttattttattttgctctcaggaccatttgggttatgttgcgtctgtggagctcccagaagttggccaaagtgtatcccagggaaataaatttggtgttgttgtaagtgtgaagggaaccaccaggggtattaactcaccagtatctggagaggttgttgaagtgaatgatcaactaagcgatttacctggattggtaagctgtagaagttgagtatggtaaaaaacgctttaataacctgctaactgttttttttgtcgttacctgcataggtaaatgcaaggccatacgagacagggtggattatcgtggtcaagatcagtgattcaggcgagctcaattcgctcatgaatgacgaggattactcaaaattttgcaagggagaaaaagacaagtattgaacaaattgcagtgagtcttgatccttgtcaatgcttgtgatgtgccatatcacttaccaatctgttggtctgtatcatgttggcattcgctaacacgtaacgtgatgctcaaacagactcaggaacatgttggaatcccttccctgtttatgttgtttaggatgaaactgttgtcgcaagtgaacatgcaagtatagcacccctaattaagctataatgatgccaattctgccaaaaccggtgtgcataatcaatcaatgatagttacagttgctgtcgagtttttgtccagtttttttttttagaggaaaactgactgtttccattaacccattgtccagtttttcaagaaataagcttgcagttctgactccatttttgtccagtttttcaagaaatagcttgcagttctgactcagttattggttatgttctggaggtgcaaaacaaagaaaatgtttgtgtaattttgtgcggcacagttttgtcatagaacatagacgacaaaatagattagggaaaacttttggaatgcataaacttggcaattcagaacttggtcctccgataaaaaaaaacaaaaaacaaaaataaggtacttctgttttatatttaagtcgttttgattttttctaaacttattcacctttgactaagtttatagtttatagaaaaatatggcaatattttcaacctaaaacaaagaaattatcaaaatatattcaatgttcaatgttaggtttaataaaattaatttggtattataaattttatattttctataaacttgatcaaattgtcaagaatttaattaaaaaaaaagttaaagcaccctataacatgaaacagagggagtactccattaggatataatttatgataaaactgatgttgttaaattcaccttcaaaatacttaatagttatgcttttatattacataaataatacaattgttatattagtaaagtaattactagtcggttgttccaaaaaaaaaagcactttatatttttgtgcatcactgcattaggaaggagaaaaagaaaagcgctaccccatgtagaaaatctcacgaaaagattgaaaactaaggcaagggagcttaaaatcttaagattttggtgataatctgaaaaaaatatatatctgattttccaactactaataacttctaatttattttatgaattgcaggactatatattcttaaaatctaaatgaaaatctgagtttattgggggagttttgacaactaaatattcagacattaagattactcctcaattgacgctccagccgaccgcctcggtgttgcctcatcttttagcctccaggttgctgctggccttggatcaaaattcaattattttactctttataaatcattcgaatacgagtctcataacatttttaatttttattttactaactaagatgccacatcagcgaaaccatatatccatactgtcgaaggatcgaaattgcatgattttgtttagtctaggagtaaggatttctagtactatagagattatttctagtactagagattaagggtctgtttggttgctgccctaaagcaaattcgcctgagctgaagcatgcctgacattttcattggtctgtttggttcaagtcctgagaaggtgctggacacaggcgtggttgctcaggctcaggcgcttgaattgggtggcctgactcaggcaaccgaattaaagaaggtagattaggtgaggttggaatattctagttgcatggcgtcatttcacaatgtttacttgtactaaccggttgagattgcaatattttatattttcttgtttgctttcacatggtttcatgctctcatgcttgtttcttgtccagggtaccaaccaaacaacaaaccctcttatatgcctgaccagggaaaacattttatagattttcttccacctaggcatgcttttttcttaggctcatcactcagggcaccaaccaaacaggccctaaggtctaaggaacttgaacaaagtcgacgtaaagttgagggacgtcaggtgattataccattgcaggttccaagtacggcccacataatacaaaacagttttcgggatccgacacgggctgaatccggcccatccaaacatgttctagacatggatgggccgccgaatggtccggtaatgggctcaatttaagactgctaacatgtggattaaaccaaacatcctcctcgtcgtcggccgtgtcattggcggcgccggcgccggcgccccaggagttctcgacgccgccggggaggcggggagctcgtcgtcttctctcctcctcctttctccgtcccccgacccccgaccaccgccacccttccatcctcgtcagcgccctctttgcagtgccgggccccttcggcatccgctgccgaccccgcgacccgagcacatccgccggcggcgcctctccgccacctatctccgactactcagttcacgctggttgcgcttgcgcacatcctgactaagggcacctgataggtaaaatatttgggacttaagtctcagtttcccccacctgaatttcattaagaaatgaattgtacaggattttccagattacatagagaacggatttccatcttgcatttttcccctcatatgtagcatggcaacatatcctatgcacacaggccctcacgtgtacacacgtgcacaccaactaaaaaatgtcaccaaaaaatctagaaaaaatcatacacatactttcaattgtattacacctagggttaagaggttaaaatcttaacgtcaaattcattatattttagccgtaacaaaaaaaaaacaaaaaatctgacagttttaaggttgcaattttgtcagaattttatcttttttgttattctctatgtagaatgaatttgaagatgcgactttgcacgtagatgtaatactattgaaagtacatgtatgattttttctaaaattttttgtgataatttttagttggtgtacatggtgtgtacacgcgagggtctgtgtgcataggatacgctcccatgtagcatatagctcatgtcaaatgtaaagtttgttttgatatggagcatgtcagtataaattttttttgcaccaaaatccaggatttgggacgtttgaagaacaaattttgtgatatacatgacatgactttactatttgcgtcatttatgcagcttcagcagaatattgcagtttgatagtttaatctgttttcgtttcattatacctgtatatttccaattctgtgtgttaccgtagatctagcagagagcaggatcttttgtttcccgaagtggggcagaatagagcacaccacaccatcacgcccacctcctcctttttaaaggagggaggtactggggattgtcactgtgatcgtgagctggagttttgcatctgtgtcagcaagcaaatactcaacaatgtgtacaatgtgtgttgtttaccttgtcagtaatggaacttaatctcattatactcgatttttattatttccaccagggcaacagtgattagttccgtggaaaaggacttttggatacggtttagctaaaatggcaaacatgaacataaccaccatcttggagaaggtatgggtttcactgatctgcatgtgaactgtatacctgaattttgctctttatttatctatgatttgattttaacatcgtcgtgtaaaatttgctttcagatgacagggaaagataaggactacagatatatggcaacttcaaatttgcttagcgattgaacaaagagggcttcaaagctgaccaagacattgagccaaagttgactactaccgttcttcaacaactggaagatacttcaggagaagtctctggtttagctgttaaatggtatgcattaagtgctttctccctttattgagagcggtatcgtcttattagcattttgttttgttaatggtgatcatccgctccttcctgcaagaattcgctgtaatttggatctcgctacttttgtaatttatgttaggtgcagttgctattgttaaggatttgcactgcctcattcaattttctggattaatataggacattgattattacagtagatgttatttttttctgtatctctctaactgctgtttttttcactgcatcttcatgtctcaattattgcatccattgaagcacatttagtatagcaatttgatacccaattgttctgttatgttttccacattcctgtgttctgcacttcatggtttgctatgttaatctgtattattacttctcttggttagcttggctccacttgtcaagaaggttggtgaggatagtgtggtggagatgaccaacattctttgtgataagttactcaatggaaaggaccaacatcgagacactgctagtattgctctgaagacaatcattgcggaagttacgacaacaacacttgctgaaaagattttggtgtctcttgccccacagctaatcaagggcgccactgctgtaagttcttaattcgtctcctaattgtggtaaaacatgcttccatattaatcttgcggtgtgcgccattcgtaccatgtagtttgtatttgccgttacaattgaaagtttcagcctgctaattaagtttaccgcgtttctgatggtgcattctacttttgtgaggtgtaataccaaagaacacatttacaaaccttgtaactatgtatttatttttacctccctattcatccagtctggttaggtgtgcaaccatgtttgcttgccatattcaatttaaggctgtgtttgttattgggggttgggaacccttctcctccgcatggaaaacggagcagtccattagcgcgtgattaattaagtattagctatttttttttcaaaaatagattaatttgatttttaagcaacttttgtatagaaactttttgcaaaaaacgcaccgtttagcagtttgaaaagcgtgcgcgcggaaaacgagggagaggggttcggaacaggctgaaatgaattcagcctaagtcattatatgctggctagtatcataactccagagttatgttatcagcacagagagccaaaaagaaagtgtgttttaacatttgtttctagtttgagagccatgatagtaagtggcatagtacagtaccttccgctattgcagaaagttggatagttttccagaccagtcaatattgctagatttttctagccaccataaatttcaaaccgcaattttagctactgcagcaaatacaatgcaaatggtaaaccacgagcaatcttttatttggataaattaattaggaaactgtgatatccttcctaacacaagacagattttagctgcaaatctggcaatgtctagctatccacataactataagaacacctttcacctttacgtctttaccttaaaaaaaacaagagcggtttattgaattacttgcctttgccagcacatcatgtttaacacctgcctataatagataaaccaatatacggattttggggcttagtagcaccaatatacggattggggcttagtagcatataactggttttgttataccatgggatgtcttgggtaggtttgataactcttcttctgttgacagggaaaaagtgcggaagtgaaatgcgagtgccttgatatattgggggatgtacttcatagatttggcaacttgatcacaaaagatcatgattgcatgctgactgccttgttatcccagttgagctctaaccaagcaagtgttaggaaaaagtctatttcttgcattggtaagtcgaactgatgtgctgtgctattatatgttgttttttgcgtggcttgagtttgtaaaggtgtttacactgactgttaacatgctatttttcttcagcatcacttgctgcatgtctgtctgatgatttattagccaaggcaacttttgaggttgtccagttgcttaaaaatagaagtgcaaaatctgaaattgcccgaacaaatatccagatgattggtgctctaaggtactttggctttcaactgtacatgtatgccttgagtagttcttttgaggaacagggcacactcatttgttcgcaatagcttagatgagatcatgttcacacttcaaatttatctagcaagttgaaatccagatatttactactttttggcgatttagtggttcttatctggtgtgctgcaatccaagttttgattcaatatttgtttcatttacagtcgctcggttggataccgttttgggccacaccttgctgaagttgttcctttgctcataaactattgtacaagtgcatcagaaaatgatgaagagctctgtgaatacagcttgcaggctagcaattttcttctttccaatgttacatgactaacgagtgttctcttgtatgactcctgtggtttttcccataatgtaggccctcgagagttttatgctgaggtgtccaagagatatatctccatattgtgagagtattttaaatcttgcattggaatatataagctatgatcctaatttcaccgatagtatggaggaggacactgatgatgaggctcaggatgaggaagatgatgagtacttaattgatgctcttacagtaatagataaatgttatctgtttacttgatcaaaatatgttttcgatattttctccagtgagagcgcaaatgaatacacagatgatgaggatgcaagctggaaagtccggagggcttcagcaaagtgcttatatgcaattatagtatctcgtcctgaaatgttgtctaagatgtatctggaggtatattgacataatcatgttaaaccaacatatgattatctgaaaaatgttctgtttgatggcatgtttaaatttctcccatgtttcagacagtgtttctgtaatgatttttacccatttaactttgagtgccccatttaactttgatgtttttattttttaaaatatatgcaggcttgtccaaagttaattgaatggtttagggaaagagaggaaaatgtaaaggtaattgctttgtatcaataatttgtcagtctctgagttgtctctgagttgtctttctgtttgtcaatctgatgaagcttctatatgattctagatcgacatctttaacacatttattgagttgttacgccaaactggtaacatgacaaaaggataaggtgacattgatgagtctaggcaagtctattgtgctcttatttgcatcattattttcaacttttccaagttatagcatcttatgcagtttattggtgaaatacttttacatgcttgaagttgattctaccatgtttagagcactgagcctatgttggcaatccttttgcttttcagccctagatggttgctgaaacaagaagtacctaaggttgtcaaatccatcaataggcagttgcgtgaaaaatcaatcaagacaaaggtgagctctttgactgcaaatcatgtctatcgacctggttctgattttagataaaatttcaggttggagcattctctgtattgaaggagcttgttgttgtactgccagactgtcttgctgatcatattgggtcacttgttcctgggattgagaacgctttgaatgttggtgattcccattttgctaaaaaagattatgtgcaggacttctacttgttgctaacttgttttctttttcataggataagtcatctacctccaacctgaagattgaagcccttgtatttacaagacttgttatggcttcacattccccagctgtgtttcatccatacatacaggtaactgtaacatatatcttcagtaaaatatacttatggcatttgtcatcattgtattgatcgtagtgaaattccaggctctttctggcccaatattgtctgctattggagacagatatgacaaggtcaccgctgaggctttaagagtctgcgaagagctagttcgtgtacttcgtccaaattctgaggtcaatcttgtatttcatatgttgctgaacaaaatctaagttctgtttcttgaagcctttgtttgtttgtgatacagccacactctccagattacaggccatatattggtccaatctataaggctatcttggcccgcttggcaaatcaggatcaggatcaggatcaggttgagcaaaattaacacctccctatcctcatctgtctctttctctctcaggtctcttatggaaatatttgtttcaggaagttaaagagtgtgccatatcttgcatgagccttgcgctatccacgtttggtgatggtctccaaagggaactgccggcatgccttcccgttcttgttgatagaatgggtaatgaaataactagacttacagcagttaaggtaagctaccgactgcacctttactgacagatagcattgctaatctccttattgattcattacttatgagcactacttgttttctttaacacaattatgttttagtcttactttacttgttttatggaacacaattttgttttagtctcaggttgaagattttagtaggaaagaatagttaactaaacccacacccccaagcgtatctcaatattctggtcaatgatgttaaaggaactacgagtgttttgatcaatgctggtttcacatatcggtagattgcctgaaagagaaattgtgttgtagttggtccattgtgatgcaaacttagttgaaacgtatttcaccaatctatttgctcagatcatgtcctcagaattttaatgatataacttattatcacttgcttaatgaaacaagatggattcatactatcggcgcagctgctacttctgccatctcacccatctttcaccttgctttgataccaattgttggtaggatcacttctgaactacactatagtaagttgaaactgagactgaacatgagcttaatatatatacactatatgtatgtatgtacacacacacacacatacatacatacacacatacatatacatacatacatacacacacacacacatacacacatacacacatgactacttggcttactgacaagggacttatagcttattgaccaaggaaaaacagacttgacttactagcaggtcttagcttattggagaaggaaaaaatctattgaccaatacaatgcttactagctaaggaagaactactactagtactgattcagagattatatggtaacactccatgccattttacctaacctattttcaccatgtgtgcacccccctcaattcaaattcagacacccacattagcttaaacttagcagagtaaattaaacaagtggcacccccctccatctcattctagctccgcccctgggaagaagcgacatcagaggcgacgctgtgataggagagacgcacctgatgcgggtgttacgcttgtttctttgaccttgggctagtatgaaggttattgggcttttgtgggatggcctactaggctaattttcttcctctcccttttctaatcgctgctaatcatgaaggttatggcgtccccgcaccttagcgctttacccctatagcggtaatgcgtgggtgggttgccccagatcgccttaccatcttgacaaccatgatgttcgaatctaattgtttagccatttgattttgtagctgtgaattttagaagtcacagtgcaatgtatcctgtgctgaacaaccggccgattttgaacagtagaaggttactgaattgaaggaacaactccataggaggaagctatcataggcttgaaggatgatcttgttaagaagctcgcggaggccctccacagagaggttactggtagtgatgaagaattgcctgtggaggagcagaaagaggacataactcttgtttcaacggattcattagaaagaggactatgactacgcaccgacatgccatttgaaatttttagctactactattagctaatgcaactttagcagcttgtcagtaggaaacgccctttgactactcatgcattttggttcatgcatttagtgaataactttttgaaagttccttattatagaaatatgtttcattgtaggattgatcaacaatattttaatccatactttttttgttttgtaggagatagaacacaatggacaacctttaggattagtgaaatcgccatcatcagtagtagaatagaatgagcaggtaatttctccaattccttggaacatgctatcatatttctttatgattattttttgtttatctcattatgtagtaattagtttagtttttataaaatatatatttcttttgtcaagttagtttacttgtgaaatctctattgctttttgttaaactctgtgttttcctatccttaactgttaagcaaaatttactttaggacactaaatatttgtggcttatgctttaggacattttagttttgtggtgatttgcccaaaaaacaatccgatcattattttaatttatcttcttcaaaagcttatgctttaggatatctttgttttgtggtgttttgtccaaaaacactccgaccattattttaatatatcttcttaaaatggtgagaaaatatggtataagagaaatttaaatttggtccaccttgcaagataattcttgaacaaataataggtacatgcaaacatatttttgaaaaaaaataagcaaaacttatcccatatttgtaaatatgtgaattgcaaaaaaattaaaactgaaaaatattggttgaactttaaacgttttaaaaaaacaaaatttaaattgtgaaaaaatattaaccgaatttatttttaataacaaattttaaaaataaaaataataagattaatgaatttcgtaaatttaaagaaccgtgaaaatagaatttaaatgaatttattttaaacaaccttcagtaaattgttgttgatttttacaatttgggacaagtttaattttgcaaaatacgttttgttgagtaatatttgttataactagatgatgccccgcgctttgttgcttgatatatatgttagatattgtagaaatggtgaaatgatttggattgaaatattgtgaaaatgatttgagaataatgatttagcatgtgtatatttagttttagaatgaaataaattgtatatataattactatgtgcttgcatgttgagctttgtatgcttagtggattgatgtggcatgcttgcatgttagattttaggagtgctaataaatactatgcttgcatgttgagctttaggtgtttagtgggcattagctttatagatgaatggattcttgcaaaatggcctaggattacaattgtcttttcaaagtctttttctctctattttaagaggatatatgaagataatggtcaatgtgttttctagaaagtagtggcgggtttaggaattttttactaagtgttcctactccgcgctccaaattcttttgacatcatgaactcaatgttttcagcccattaattttcttttcgtgttggtagccccatcacatccttaccatccgtaagtaaagtttgaatccctttctaaagggaagtagaggtggtactagctatgtggactacttaaaggaaccgctcacatacgcttccaagtttgttagcataacacaaacaaagagctaggtgttctttttgtgaaatatcactacaacatggcaacggtgttggtcaccggtagcctggcatgcctcgaacagttggtccaatcgacaacgtgtcggcagcgagtagcatggcgcactagtagggggctcgccgactcggggatgggtggcacgatggcaagcaacaaatcgtggctggggcgacgtgggagtgtgggcttctttgtttttgggttgagggttgggccgaggggtggtaggggggggggagtggggggcggattgtgtttgtggactagatttttgggtggtccaagctgctcgcaaaaaactagtgttaaaagtccgaaagagcaaatgccacaaatcttaagtgttgtggagcaaattttgttgaattgtttatctagttagtttgttcgtttgtttcttgttattactcattttcacaattcattattcatcaatgttttcattattcagatattagaaagtattgatgatttgacactaataagatatctaattaagtggattcctgcccaaccttgggccgatggggagatttatctgtattctccagatacacatagttggtcttctcaaggcatgaagatgaaattctttatcatggatgaaaagtataatatggaagccaaagggatttataagaagattgatgagttggtcagcctggctaatcattcaatgtttctggctccagtgtttgctttgcatgataagaagatcggtcgtattattctgtgttatccaaaatttgatcaactgcttaaagattggctgcctgctcaagccttttaaaggccggtttataccacccatatggatgcatcttataaagtaagtataattttattcattctatttttgtatctctctcggttgatgtgatacttatatcttgctctatatacacaaattctatttttgtatctctctcgattgatgtgatacttatatctttctctatatacacagagatgtcatatcttacatgagcaacattgataacttggctgcaagcttaggaagtattgactcatatgtgttggagacaaagcccgagagaataaaggtcatcctttttccttttgagtcaagagaagtaaattggcgaaaagattttgctacatttctgatagaacatcttcggaacaaatggaaatccaccatgttggatcacttcatcaacatcttacaaaaagatttcaagtacgtaaacagtcatatcgtttctcttatgcttttgcttatattagtaacggaaaaactaagttgtgagcaaaacttttatatacgtgtacttattgattcaaaagtaaatattgtaaaataaactatgatgaaaaaaactacaaaaatcaaatacaaaattaagttctagaattcaaattttggcttataagcataagtgaaatggtagggctgaaagagtcctgttgtggtggcagcgaatctgtcacccaccattgtttttttgtagttcttacaaagtgctcccatatattttttgatattatgaaatagtttggtatttagttcaaacaagtaaataccatatgttgataagcaaactagtgatactaagatattttcaccattgttttttttagttcttacaaagtgctcccatatattttttgatattatgaaatagttcggtatttagatcaaacaagtaaataccatgtgttaaggtaagcaaattagcgatactaacatactccctccttcccacaatataagggattttcagtttttgcttgcaacgtttgaccactcgtcttattcaatttttttttgcaaatataaaaaacaaaaagttgtgcttaaagtactgtagataataaagtaagtcacaaataaaataattaataatttcaaaattttttgaataagacgaatggtcaaacgttgcaagcaaaaactcaaaatcccttatattatgggacggagggagtatttgataagaaatatatttttctatgacatactccattataatatattttctcttatccataccaaaatatagacatttagctaatatctctaaatatatcatgtgtggtttctttttatagaattgggtacattcaacatcatccgttgttgcaagatttcaatcagctttctaacatgataaggatgacatggaaagaatctaagtatttaactgttgagaggagagtattgctatcttcaacattaaatgctattaggaacaacattccatggacatcagtgacaactatggatgctgttgtgaatgaatacatttctaaagcaacaaatgactccttgggcctctttatggaaattaagaagatagcagcacattacattgaaaaccgccgaaaactgaacaaagaaaaaggggtaagtataaaaaacattatatgtcataatataacaatgcattatattaattccaaataagtttaattttagaaattaatttataatgtcataaatgtttgattctaaatgtgcattttttgagtgattgtagatatgcaataggaaacaggtacatccaattgagataatcgaagaaatctggccaggtgctattgaagaaatttatgagcttagtttaaaatctgagtggctcatgacttgacttgtgaatggtgagagtgaaaatatcaggtaaatgcacagaactatctatgtgttgaaaaattctgcaggaactttcaacatagtacctacagatcttgatggcctaattacaactatgtgttttgtcccacctagcatcttgctatacccaatagcagttttcattgcaagtaatagtattcttgtgttctttttgtcacttaaaaattaaaattagttttggggctgattacaattgacttcttttagtacgtacaattgtattctttttatactacataagtgattttacatttaactgcatgtgccttttggggggcaacatacgatttgctttagtagcccttataaatgcttgtaggagtacgcagaagcacccataaatttgtttcagggtgccactaatttgaatggttctagatttttcatttgcatggttgagcttcattgctgcctgtcaaaacacagctgcagttacttatctttcgtgttttccctttttcagtgctgaaggatctggagtactctgaaaatcatgaatgggttagtgttgaaggcgattatgcaacaattgggatttcagatcatgcccaggtacatatttagatgttctatcactctgagcaatttttttttaattttgcgtaaaccttattttgcttcatgatactgtcaccttgcataaaatggatttaccaaaatataagtcagatatataaggatgatgatagatactgggaggggcagttccaacacttactactagaagggtagagggtatccatgactgcaagtgggaccctttacatacagatataatataaggaataaaatcactcacttgtatatgtgtgccgtataaaaatcgtgtcaaccatgtccttgtcgcaaggcgagcaacgctttgtattttatcaagtccttacactccacatggtgcgtaatgatagatagtggtaagatggaagatgattttaccccatagaacgttagtacttggatttggatgggagatgatataaaccccatcaagatagtagcacgtggtggactagagtgtaatgtgctgaaataagagaagtgcattgtactctaaatattacaaatacgcgacttgtaatatatagagtgaatatgggtacagtgatacaagcctacacagtgctcaattaaatcgtgattcacgcatgtctcttggattagaggctacgggagcctattgtggtcctttctcactatgcaagtgattagtagtttttcttataaattaaatatggactcttcttacaagaatatttttttttgaagaaattataattgagaaatgatgaattgatatgatttatgaaatcgcatgccatacatccttgcaattaatactgcttgctgagtgcttgtactcacccttgctactaaccctccttgtttagatgcaaacacgttcggcaagctagcgagttaaatggtgggttggaagagctctacaggaaagatgaggcagaactagctctacagcaaaagatgaggcataacttggttgaacgtttttttgtttctcttttttttgggtgaggggatcgccttttgtttctattgcatgctatgtaacggtggagagaatcattatcttcactatttgaaaaatgattctacagaagatgattgttttttatggcagtgcttgaagggctctgcttcgtggtaaaaaagaacacttgcgaaatgttggatcatccttgaaccatttgaaacagatttgtttttttactgcctaaaatcacttgcaaagttcttgagcaatttattttgtttgttcagttaaatcacatagttggcctttactgttgttcaagtttttttaattggttacacattttttttccgctgaaagtgctagattgatcagacgactgaagcataatcacgcatgttttgatcccttctgcttccatgagcttgctagtcggttctataatttgtgatcagattgttatacactcactgtatgctacaaggtttctgtgtatgtattcaaatttaacattcatctactaaaaaaatatgttgcaatgtgtaggtctcatctagtagattaaaaatcaatgctagatcactggaattttacctcaaattttcatggaaatccatttttcactctgagctacaaaaccggttctttttcactgttaacttttaaaacctagcatacatgccaatatgcgattgaaccatcgtgttaaacctgttagtcaaaacagcacaatcctattcaaaaatgacaacgttattctactcctaaaatgattgtcacaatgaaatttgatcaaatgtgatgaaactacaaaggtcataaaattacacccaccaaaaatatcacgtatttttttcaaactagaaaccaaatttgtattcttcaatcaactacaaacaagtcgggaagagaggtgaacctgtccaaatcaccgaaaaaaatagtcatttttacccaaaatttgaaaccattttttattttttagtgaatttcagcctaatttggtgtccactaaatttgattgaattcatatgaaggtttcactttttgttttcaaatttggttgaaaatttggaatttaagtgatttgggtaattctctccataaataaatcatacaaccaacaaaagtcgatggctgagtcaaaggacttcaataaacaaatattcagtcaagtacatggcattttaacataagatcctctgtttttctcttttcttctagtagtataaaatagctctgggtgaggagttcaacttaaaagtcggtagggtatttgtcgggtttaaaccacaaggagaaatcaattcctttcttcttaagatcttctgtggcagggccaatccgatccaaaagctgcaagtcaagtaacagggttgatcagcaactccataaaatttctccaaaagacgaccaaaaattatcattactcttggtgatgcatactactaccgtctcacaataggttcatttttcactagtcccacatatatcaatataaaaccaaaaagactacaatagccccactttatcaaatcccaatacggttattcttctttttatctactccgaatgaatttatctcctactttcacaaactccaatacaatgattgctcaaaataaatgaacttattttgagacaaacgggatgggcaaaaaataatcttattctgagatagagggagtacagcatatacacactgaacaggcagcctaagcctggaattctcctacaactagtatgataaatctttcggttggaattcttaagttcgcacggttggaattcttaagttcgcacaattggccctttagtggtatgacaatgaatgcttaagatatgagtattgtgatctttagcatgagagaacaaactacttgttaagacttaagaacaaacctgatcatgtacaacaccattggaaacaaggacagaacgatcaaagacggtaaactccccaccatccatgcgtgacaccatcccaccagcttcttcaactatctgtagtaaaaaaaaatgccgaattcatcaagtaattatactgaaagtgtgcataactttagcccaactatcaggatttggacgatatgaaaaggaactcataaaaatggattatatgactgaaaatgtgtatttaagattgaacaaaacaatcaaatccttgtttttactgaacttggatatcttttcttttatcaaagtttaattccaatcatgaactgcgggttctgatagggtaaaaaaagattaccagaacaccagcagccatatcccaaggcttaagtcggtattcccagtaggcttctgtaatgcctagggcaacgtgggacatgtcagcagcagcagaacctagtcttcgtactccctgaaaaaaaataataaaggaggataaagcaaaagtcaaagggggtaaatttgttgtgtaataatgaagggagaattcactttaccctgctaatgtctgtgtattccttgaacaaatttatgttggtcacccatgcatcatcatgttcataaccaaaaccagttaccagaagtgattgttccacctagagaatcaattagagacaatatctttcttcagtcaaatattctgacaaaattaaatcacaagaactctggttgcatccagaaccactacaatcaatagatagatacactgagcgtatgatcaaagagagattcttatggcttcataaaaaaagagctattatgacacgcatatgcgtgcgtgcacatagcaacatacttgtataaaagaaaaaaaaagttaccttgtctgtcttactgacatgaatcttttgcccattacaataagcaccaccaccttttcaaggagaaaggaaaaccttaaaaataattctgtagtgttctataaggaaaaaaaaagcattgcaactacagtgtttgaccaaagattataccagatgatgctgaaaccgtacgagtgctccagcacataggaccaccacaaaattcgacctaaataagggtatatgaaatgtgaataatccagagggatgcaatgaactagcatgggaagtttgatgatccaattgtgtctccggcgtttaatgaatcatatgattcaagaaaaacacatgcacatacataccacagtggaagcagcaggctttccgcgaaacagaactccaatggatacagaaaagctagggtaaccatgcgcaaagtttgttgttccatctaaagggggtaaaatcactgcattagatcccccaatgaagaatactacagaaaaagtctaagtttccactgcagtaatacaagttcagataaaccttcagttaaaaattaaaatcaatgtgatcccaatcttgtttcaaatttatgaacagttcaaatactctaacatccatttatatgaaaggctttttccaacatccattctcctaccaataatactatatactagaactaataacatcctgttcagttaccagcccatgcaatcgagcatgttgcctctactaaatcaaatatttcagatacttaatcaagagagcatatggaatcacccagtattcttaaatgattactaaatgatcaaactccactacaggaacaattggttaatgacttcatcatagtagaattacaaagtacttcctccgtttcacaatgctagaatgacttacgttgtgaaacggagggagaataaagtggccaaacctaaaggatcaatgcaccagagatactccgacaaggcatctccaataagtccaccttcctccccaagtatgaggtggtctgggaaggtcttcctcacaacttccagaatgaccgactcactcaatttgtctgtgctgaacaaaagtagagaacacactaaattcaaatgctaatgttttatttagattatagagatacatagatcataaaatatgatattagcaagtagcgacatcaagttccaatttacaaagcatttggagattgtaggatgataacttttttcttttgaaagatcaagaatgataaataacaaccaagttagcatcagatggggaaacaacaacacaagtaagaagcatccttactctgtgaccaggtctgcaactcccttgtagtgaatattgcgtggcttattaacagcttccattataacctaaaatgaggagaagacaatgtaagctgccttgagaattggcacatcaaaaaatagagttaaaaggaaatgagcttagctcactaggtgagatgtgtaccggtgtacaaccccaccaccgaagtccaatttttttttagagctgggatgattacatttcaaacgcctcggcctttgcaagaaagcccagaacacctaagtttaatttttgtttggctcgattcttaattaaatagatacctaattcattctttgtatcccaccaaaaaattataagaaggataaaatgcactagcatggaaactcgagaccacggtccatattttttccttgtagagaaggctacgaagattcgatgaaccttgagcatttataacattagtgcattacgaactaccgtgatctccatatttacttgtagaatagccaatatttcaatccagttctcaacctgacctctctagaaaccaatagaatcactagttcctcacatcaaagaacattaaccataacggaaatttcttataaggtttcacagaaatatgcatcttttgtcggaaataacaagattaagcctgaattttattacccaactgctcaaccgttcatcacaacctctgaagctccaattttctgtcagaaaccaacccaagaagggagagctaccaagcaaagaacctcgaacgcacctcggctccggccctggctgcgtcctggatgacgccgaggagctccgcggccggaatcgggccggtggtgggggcggccaccttggggcacttgcccctcgcggcgggctgctccgacgccaccgccatcacggggcgagctttgccggccctggaggcaagcgcccggaggccaagaaccggtccccgcggcgaggttgtgccattcctgcggtgtgaagaggcggcggcagcggcggcggcggcggcggtgggaggacggagaagataccgtgccattggtgctcaggccttcgagaagatgtctctgctttttttttttctttcacctctgcttcgattccacatgtgtgtgcttttcacttgcaaatgtactccatggagtaatagttgctttcatttggatttgaaaaaagaaatagaacttctaaaaataaaaaaaaagtctttttcttttttttttagaattacacagtacaacctaccactgccattgcctcgctggcgaggacgtgtcgacgggtacgtcgcctaaattcgctcccatgaggagtcgaacccaggacctcggtgctactgaggctcttataaccactagattacaggtcatttcgcaaaaaaaaagttttttttctaataaaagggtagtatatttttttgctgctggtatggataatgcctatgctgcatgaatcttaatttgcgtacgcgtgtggcattatcttaagggcctgtttggcatagctccagctccagctccacccctcctggagctggagctcagccaaacagtttcagctccaccaaaactaggagtgaagttgggtggagctctctcacaaaatgtactagagttgtggagctgggtttcggcaactccataactccactccagactcaactcctggagttatatttaggagttggagctgtaccaaacaggccctaagattcatgcgagcttaatttcactttcgatcttaattattttacctggttcatttgatgatttgcttactgaatgtctcgggtatttagttccaagagaacatctcagttctattggtaaccttcaagtaaactgatatgctcttttccaccattttgcaggttaaggatagaccgcatgaggctcaaagggcacgccagatagatatttttcagttttgtcctcttgcaactcctgcacctctctactcactatagtagcagtgaccacacaagcttacctgagcttgagagctcagcattatcttctcagtcttgttctcccttcacagtttcagatttatgctctttggctgtcaagactcgagcagtctgttgccttcaccttgtgcttatgtgagttagtttctgtcttctctcaattattactagtacttgattcttcagaggtcatgtgggtttgaccaattagcacattgcagttttctgtttgatgtccatggtgaatttgtggatacaccttatggttttcaaactagtgttttggaaacaacttacatgctacgcattgaaatgtttgctttctgaatatcttgggtagaagttctcaaagaacatacaccagctctattgataaccttccagtatgctgacattccttctcccaccattttgcaggttgaggatagaggctctgttgtattatcctgtcacaaggccaagatggaaaattaatgctagtcaagatgccacgcaagaaactggcctgattgatgcagaaattaattcttatgcctatagtgaaaggaagaacaggaaatacaacggcgcctacatcgataaagatggtgtatcaaggaccttcgatcgaaagaaaatatcaagaaaaaggggtaaatgctaaatatattatctttccagttgttcttccctttgttcttttgttcagcacttctacattccatgaagtatctaatcagtatatgtttgcaagtaaattgttttccctccttcaaaatgatctaatgtcttcaggtttcatgcagggggtgctatgagaggccggggctggaagtatggctctggttttgtagatggagtcttccctgtgctcagtccaatggcacaggatatcttagaatttgttcagaagggaacagacgttgcaaaaatctgggaatctttggataacattccttccacacacaatctttttgatgatcttgtgaatgtcgctgtccaattccgtatgaacaagaaatgggatctgatcattccagtaagtctgaaccctgcacattctcatcattaactaatcggatattcacatctcaatgtttcggttacctttgatcagtattttgatgtttaatttgtcaaaagtggatataggtctgcgagtggatcctgtacaggagctcattccgtcctgacatcatctgctacaacctgctcatagaatcctatggcaagaagcgtcagctgaacaaggcagagtcaatctacatggctcttctggaagctcagtgtgtgccaactgaagacacctatgctcttctcctgcgcgcttactgcaacgctggatcgctgcaccgagcagaaggcgtgatctcggagatgcgcgagcacgggattcctccaagtatgcagctcaattcccctatattgccaagagaaagaagcttgtaggttgacatagttgcataactcatgtcaagaacaatcttgcagatgctactgtatataatgcttacttggatggattactgaaggcaagatgtaccgaaaaggcggtcgaggtgtaccaaaggatgaagagagaacggtgcagagctaacacggagacattcaccctgatgatcaatgtgtacgggaaggtcagaattcagagcacaatattgtttttcagttcactgtaaaaatcttttcatttctctttctttgaaaacttacctctgaagaatttctgacatatattttttcatggtcaatttgaaaggcaaagcaaccaatgtcatcgatgaaagttttcaacgagatgaagtcgattgggtgcaagcctaatatctgcacttacactgccctggtgaatgcatttgcgagggaaggcctgtgcgagaaggctgaagaagtgttcgaggagatgcagcaggcagggcacgagcctgacgtgtatgcttacaatgccctcatggaagcttacaggtgaatatcaaattagcatatcagtcatccatggcttcacgagcccaagtttctgatcacaaaactccagtgaaatttgatcagatttttttgtaagtttgaattagcaattaatagcttgcaacctttcaatgcacccatagccgcgctggattgccgcaaggcgcatcggagatcttctccttgatgcagcacatggggtgtgagcctgacagagcttcatacaacatcttggtagatgcatatggaagagccggccttcatgaaggtacattttgcagttggtgatggaaaattttggccaattttgtggtcaaagaaaccaagaacatgagttccatgatgctactatgaactctgaaagtgaaagcctccgaatatatataattttgcccctgtctgaactctgaatatactctctccatttcaaaatgtacgacgccgtcccaaaataaggcaacggcgttatacattttgaaaaggaggtagtagtataattttgccactgtctgaactctgaactctggaagtagtgacagcttcttctgagaatgtataaatattcggtgttttcagatgcggaggcggtgttcgaggagctgaagcagcgggggatgtcgccgacgatgaagtcccacatgctgctgctggcggcgcacgccaggtccggcaacgcgacgaggtgcgaggaggtgatggcgcagctgcacaagtccggcctcaccccggacaccttcgcgctgaacgccatgctcaacgcctacgcccgcgccggccgcctcgacgacatggagcgcctcttcgccgccatggagcgccgcggcgacgccgacgtgggcacgtacaacgtggcggtgaacgcgtacgggcgcgccgggtacgtggggaggatggaggcggcgttcgcggcggtggcggcgagggggctcgccgccgacgtggtgacgtggacggcgaggatgggggcgtacgcgaggaggaaggagtacgggcggtgcgtggggatggtggaggagatggtggacgccggctgctacccggacgccggcacggcgagggtgctgctggcggcgtgctccgacgagcgccaggtggagcaggtcaccgccatcgtcaggtccatgcacaagaagcccaagacactcttcaccatataataataaaaaaaaacccaacactttgcatatataattgcattattattacatgtataataatacagtataaatgtacattacaatactaccttagttttcttttaatgtatgccgccattaattctaaagtagcggctaaccattcatcttaattattttaaaaaaatattgtaaatatgctactatctctgttttttaatataactaaccaacgtcatatatttagggatggagggagtaaattgtaagtcataaaacatgtgacaacaaaataaataaaatttatatatttttaatagcatgaattgtcaaacgtcatataaaaaatcaacggtgttatttattagaaaatgaagggagtatattatagcatagagtataatagattgatttagcatcaactttgttgctgtagagtgtaaaacggtgttgtcttgacaaatataatgtaaacaggatgtgtatgcaatcaaaccttaaacttttaaatcattttatgtataaaaatatatgtgatttggtcaaaaagattactgtcatgtggttaggataggagtatattttttaacaaattatgaatacattggtcagataagacaattattaaaccgcacattctttctattccttagggggacttattttagtccctctcaaaaaccataaatgcttgtccctactaacagaaactattaacagtaatagttttgactcggcccactaacaatttttgaactgttaaactacgatgaacgaacgaaagtaaatgcttacaaaacactcaggcaactgatctttttaaatatttaaaaaagtttcataaaaacaaatagtctaaatataatctctaatactccctccattccataatataaggcacaaccacttttttttagatgttccataatataaggcatgcatgtatgtaggcaattaactatgaccccttcttcattaaattattacttttttaaatcctccactctcatgttctttaattctattagatacatgcattatatttattaggatgatccaaactacaatatgataataaatattttcttggtctttgggttaggggtgtgtcggtgacatgggaccgggagtatcatgacttaaagacttgaggcagacgcgatcacccacgtggcctaaccccctcggggggggggggggggcccgagggtgatacggccgcccttctctttgtctccccgaggggtcggaccgctcccgtctcggccccgagggccgaggcgccccgaccccttgtgggttttgcgccgcgtatatggggtaggtgagcatagcggggctcacctaaccacatttattgcggtttggacgagcgcgtcacgccacatgtaacgcagtgcagcgcactcgtttatccggtctgtgaccagtcacagaccgatcagatcgtgggttaggtggcgacaggcggtctgacgcacgcctcgccccatcccgtcaggatgagagcctccaagcactcgtccctagccggagccggcgtgttagctcctggagatggcacgttggtcccggtcagatatatgccaggcttcatcctaaccattacaggcaagatattgtatgaagaagggcgaacatgcagattgttaaactgacacgtggtggacaagaatgaccgatttgtgaccggtctgacaatggtcatgtcgtcagcagacagccatgttcccacgtcgcgcctgcttccggcggaagtggaggtaggtatgggccgtcccatcagaaggtcattcggacggcagccatacaaatctccgtccattaatgaagagaagtcaagttggagggaagagaggatgagtccccacacaaaagaaagagagggagagatggtgcatgtggtatccccttgagatataaaaggaggaccttgcccacttagagagaggggaaaaacgatcccagaacgatcgggggctggctcgcactttgtagcttcttcatacatagatccaccaaaacacaggagtagggtattacgcttctcagcggcccgaacctgtatacatcgcccgtgtcttgtgtgtttccattctcgcgaaccttccacatacagactaggagcttagaatctcacccagggcccccggccgaaccggcaaaggggggcctgcgcggtctcccggtgaggacccccacgctccgtcatctggcgcgccaggtagggggttctgtgtgtgttcttctaagctctcgcactctttcgtgtgcgccaagcttttcctgttcagcccaatggctgaacaagcaaaggcgcacaacctctctccgagtgttagcggtgacgacggggagccaaacccacgccgtcgtgctcgtactccaccgccccctccacgccaaagtcctagacgggaggaggcgctcgagagggtcgaaggatccgcgacttcgacatccacgggtgatggaggagggcgccgagatggggagcgtcgcctcctcgtctatggcgacggcagcacgccccagggcgcgctccaagctgcgggcgcgctcctacgtcacccgcccgttgtccctgacccggagtctccagtccaacgttggctggacgacgtggccaacttggtcatgacggcacggcagcgcctaggtgctggtgggcggtcctccgccaccaagacctctggcgctgctaccaccggctccgtgtcgtcaaggcggagggcacggcgagcggcggctgttgctcgccattcggccgccactccttcgtcagcacctccgacccaggaagatctgcgtggggggccggatgcccgcatcagtatcgagcgccggcgtaatggccgacgtgctgcccatgcaacggagggcgcctcctcgtccggagtgtcacatcaacacggacgcggggatcagccctccgtgcccccggttggtggtgtcggctgtagagcctttgtggcgagccttcggaacgtccgttggcccctaaggttccggcccaccatcgccgaaaaatatgacgggagcgtcaaccccgccgagtttctccaggtctacacaaccgggatcgaggccgccgggggtgacgacagggtcatggcgaatttctttcccatggccctgaagggacaggcacggggttggctaatgaacttgccacccgcgtccgtccactcttgggaggatttgtgccaacagttcaccatgaactttcaaggcacatatccgcgcccaggtgaagaagcggacttacatgcagtccagcgaagggatgatgagtcacttcgctcatacattcagcggttctgtcaagtccgcaacaccataccatgcatccctgcacacgcggtgatctacgcgttcagggggggtgtgcggcacaaccgcatgctcgaaaagatcgcctccaaagagccccagactaccgcggagttttttcagctcgcggaccgagtggctcgtaaggaagaggcatggacctggaacccctccggttccggtgtggcagcttcggccgcccccggatccgctgctcggacagggcggctgtcacgcccagaaatttagcccaaatttccagactattttgtgtattaaatccctgtccaggaccagccagggtacacaaaacgacaagtaatatacagttccaaacgtaaataaagcgtaaaatacttacaaaagaggcacttagtcctcgcaccgaaacgaaaacagcagcagcggaaaaaggcgatcctagcggggcttcagctccactccacaggcaaaactcaactggggtctgagccttggtcctctaacttcgtcttcagctcagaagcactacacttctgaaaagggggaataatagcaagactgagtacaaccaccgtactcagcaagccacaccaacgatgcagacgtgcaaggggaacacaaggacggtttgtggctatttgcataaaggcggttgtaaaacattttattgagcaaaacagtaaaactgttgagtaattaaagtaatattgaatctccactgatcaacgctacaccacgttgaacaggcccaaccaacccacctaaactacagtgtattgggtcgatttattaaggtgggactaatcacggtgaatctggtcgaccgcccataaccgcgggcacggctattcgaatagttttactctgatcagaggtgtacaactgtacccacaagacacagccccacgacacgtttccgtgcgccgacatgccaccacgacataccggaaagaggccgtgacaggacccttcgcataaccccctctaaccaagcacaccacacctcaggtttcacccccactcctcgcaaggcagcgggcagtcccctctcgtgcctaggtgaatccggaagccgcataggccgtcgcagggcccatccaaactccatcacgcccacccttgcctggatgcgtcggctagaggaaagctacactacaagcccagccgttgcccacgctggcttgtggtaagtacgataagttcttccagggcatcccgcgaaccggtccttaactgccatgggtgcgaccagcaaaaccatgcacccacagcccaccattcagtcgcattttagttggatacttacgaccatgaagcatggccagatgtctcgagcacgcagctcactctgatactaaaaaggtctaatactgcaattatcccatcaactgagctagtggtaattaagcatggctaagcataaagttctagctaggtcatcaaagtaacacaagctaggtgatttattacccaaggatgacaaaggacagatatcaagtaaacatggcacaagcgagcagataggtaaaaccctgaccccatgtaattagcaaaacatgcatatttgtttgcaaacagtaaaacatttgtaaattaggatcaacatgctcaaggggaatgtgtgacttgccttgcttcttcactttgatcttccgaactcttttcctcgcgaccgcggacttccgaaacgacggaaactacacgctggcacgcaaaacgagaaaaaactctaataaaaaccaaggaaacagtacataaaaactaaacaaacatgtagagctcaattttagatgaattttgcaagttgaatggctcaattcggagttcgaatgaattagatatgaattttagaagttttgagccattttaatggatttctataattaaactcgatttattgcgcaattattatttaatttttcaaaggaaaaaggctgccgctgacgtcatcaagtgaggccggcgccgacaggcgggccccacacgtcagcgggtcaagggaatcggtccaccgtggaccgggaccacggggtggtccaccgccggtccacgggaaccgacggcccagatcagcccgagctgatcgggcggccacgaggcagggcgcccagagcacgggcacggctcagagccggcccgaccgagcgatggcgcgcggcagcgcggccatcggcgacgacggccggcgacggcgcggggaggagaggagggatgctcaccaagggcggcgacggcgagactgcaacggggaaaccggtggcgggctcctcggggaggcaacggtggtccggtggcgtaccacggcgcgaggcggcggacggtgactgggacgaccggggcgcggagagggcgatttcagtggttcccggaggcgaggaagcggtggccggggtgcggctcggagttgccgatccgagggaggaaacggcgcagtccggcgtcgaccggggaggcggggcgacacagatggagacggcaaacacggcggcgatctcgggttggtggtgaagttggtgctcgggcagcgaggggcgacaaccgagcggcggccgagcttgactttgaggcggcgaaggtaccggcagtggtggcgcattggggcgacggctagggcggcggtggcgcgcggctgaaggcggtgaaaggggcggcggcctcgggtgtacggtgggagtggtgctcgaggggtggagagggggaaataagaggcggccggacttccccttgcggtggcgaagctggcggtggcggtggctcggcgcggcgacggctgtggcggcgggaaacggcgaccgaagctcgccggagtgtggcagcgcgtgggtgcggcgtggggagagcgagggagagtatgccgggctcgggaaaaaaatggggaaacggacgaggggagcacggggatgctttttatgggctcgggaaggcgggatcgaggccggacgtggcggaatcggccggcgaagtggagcgccgtcgtggggtggtggaggggttaaccggcgccgtttctagcggggtgagtgggggaaaaggtggaggacgtggagggggtcgtgtccatgtggttggatgcgagctcgggtgcgggaggtcgccggattttgcggcgacgtggggcggctcaggcggccatggcggttgcagccggccagccagaggaaggaggaggagctgacgggtgggaccgccggtcccacctgtcggcgaagggagagaaggagggacgcaaaacagacttttgcaagcgggccaaggaagaagggagccggcccgagagagggaggaggcgcgcgggccgcgggagaggaaggagggggaggaatttgggccgagcccgaaagggaggaaggggaagtttaatttgttttctttttattttaattgatacaatgatctttgtgttattaaaactatttctcgagctccgaaaattcacggaaaattccggagagtattttagggcacaaagaatattgcaaaatattcccggccaatgatttttaagggaaaattttaattctcccattatttcacttgattaaattgattaactttttattcaatttctaggaaatgcatcattaaatgatttttaatcccgaacgaaaatcggggcgttacaaatctaccccccttacaggaatctcgtcccgagattctgggatggctagaaagaaagccggtgctgatgggcggtctgactgatctgctgacacatgctgcctctttctgattcgaactgactgactgactggtttcatcggattagatccctggagttctggtacccaacacgaccgattagctgatgaaacctatacgagcgatctggctggattcaacactgttgtcccgttgcttcccaaacctgaattgattggttctgctcaaactgacgcagactaggactgcctgtactcataaaacttacttatcttgggctgaactgtcaatactagcaatttgataacccgacaattcaccaagctggtagaagagggtgaaacttgcatctggcatttgtaactcattgatcctacgtccgcttgaacgggtcctgactcgaatgacacgtaattccaggaaacctgcttgacaagtctttcgtctgaactacaaccgtccctgatgctgcttctcaaagctgagctattgacctagcctcaccggtgtacctcagaattcaaacggatgccctaagatcggcttagctcttctgataccttgcaacaggcttcttcaagtgctacccggattgttgcagtgggttgaaccttcaactaaaacagcgatgaggtgagccaaaactcatctccgagacctaccccccttacagtgggtagtcttactttcgcctgactgagaacctttgaactgttgtccttgaaaaaatgaccaacatttctcggatttacagatgccctgactttgaagactaaaacttcatcggtccatcaaattgaagcaatggcgatgcactttcatcccgacaagatttggaacttaagccttagttgatgataggaaattccacataaaagtgactctcatttagctcatggacacactgactcttgactgcaacacactactgctggagttctttccgctacacttgaccttgcatcgagctttgcatctcccgcatcaatacatccatcatctaatcttggacaccaaatgttgatcacgagcagggttcttctggcactgggataccttgtagctttcaactgaaccattgattggtgactttaattgatcttatctctgacactgaccatccgctgccaggacggaagagaggtggaagagaggggttgctaaagataaggtactaaaccacttgcctactgatatgttgtgagtagacttttattcttcaagttgcttaagcaaacaacctagtatggtcgcatccccaccaatgatgcaaaccatacccctacacacaagcaaacaacacacgatctagaaagctaacggaactactcttctgggaaagattgggtttaggtcatctccgagaaaactccacttgatcttcgcagaacgacgactctgaactgatcttctcgctccttgcacgaagcttgaggctcgaattgacttgacttccgaacagacatgaagctgacagctggtcctctaggtttgacaactaaaagaattggagagattgggaggagaattttgaaaaaccgtttcacaaagaaatgccgaagggcgagaggagacaatttgcaagtagggttttcagaaaacttgtccttagggtttgaccatttggctcaacctacagtcgaggtggctctgataccactttgtcacgcccagaaatttagcccaaatttccagactattttgtgtattaaatccctgtccaggaccagccagggtacacaaaacgacaagtaatatacagttccaaacgtaaataaagcgtaaaatacttacaaaagaggcacttagtcctcgcaccgaaacgaaaacagcagcagcggaaaaaggcgatcctagcggggcttcagctccactccacaggcaaaactcaactggggtctgagccttggtcctctaacttcgtcttcagctcagaagcactacacttctgaaaagggggaataatagcaagactgagtacaaccaccgtactcagcaagccacaccaacgatgcagacgtgcaaggggaacacaaggacggtttgtggctatttgcataaaggcggttgtaaaacattttattgagcaaaacagtaaaactgttgagtaattaaagtaatattgaatctccactgatcaacgctacaccacgttgaacaggcccaaccaacccacctaaactacagtgtattgggtcgatttattaaggtgggactaatcacggtgaatctggtcgaccgcccataaccgcgggcacggctattcgaatagttttactctgatcagaggtgtacaactgtacccacaagacacagccccacgacacgtttccgtgcgccgacatgccaccacgacataccggaaagaggccgtgacaggacccttcgcataaccccctctaaccaagcacaccacacctcaggtttcacccccactcctcgcaaggcagcgggcagtcccctctcgtgcctaggtgaatccggaagccgcataggccgtcgcagggcccatccaaactccatcacgcccacccttgcctggatgcgtcggctagaggaaagctacactacaagcccagccgttgcccacgctggcttgtggtaagtacgataagttcttccagggcatcccgcgaaccggtccttaactgccatgggtgcgaccagcaaaaccatgcacccacagcccaccattcagtcgcattttagttggatacttacgaccatgaagcatggccagatgtctcgagcacgcagctcactctgatactaaaaaggtctaatactgcaattatcccatcaactgagctagtggtaattaagcatggctaagcataaagttctagctaggtcatcaaagtaacacaagctaggtgatttattacccaaggatgacaaaggacagatatcaagtaaacatggcacaagcgagcagataggtaaaaccctgaccccatgtaattagcaaaacatgcatatttgtttgcaaacagtaaaacatttgtaaattaggatcaacatgctcaaggggaatgtgtgacttgccttgcttcttcactttgatcttccgaactcttttcctcgcgaccgcggacttccgaaacgacggaaactacacgctggcacgcaaaacgagaaaaaactctaataaaaaccaaggaaacagtacataaaaactaaacaaacatgtagagctcaattttagatgaattttgcaagttgaatggctcaattcggagttcgaatgaattagatatgaattttagaagttttgagccattttaatggatttctataattaaactcgatttattgcgcaattattatttaatttttcaaaggaaaaaggctgccgctgacgtcatcaagtgaggccggcgccgacaggcgggccccacacgtcagcgggtcaagggaatcggtccaccgtggaccgggaccacggggtggtccaccgccggtccacgggaaccgacggcccagatcagcccgagctgatcgggcggccacgaggcagggcgcccagagcacgggcacggctcagagccggcccgaccgagcgatggcgcgcggcagcgcggccatcggcgacgacggccggcgacggcgcggggaggagaggagggatgctcaccaagggcggcgacggcgagactgcaacggggaaaccggtggcgggctcctcggggaggcaacggtggtccggtggcgtaccacggcgcgaggcggcggacggtgactgggacgaccggggcgcggagagggcgatttcagtggttcccggaggcgaggaagcggtggccggggtgcggctcggagttgccgatccgagggaggaaacggcgcagtccggcgtcgaccggggaggcggggcgacacagatggagacggcaaacacggcggcgatctcgggttggtggtgaagttggtgctcgggcagcgaggggcgacaaccgagcggcggccgagcttgactttgaggcggcgaaggtaccggcagtggtggcgcattggggcgacggctagggcggcggtggcgcgcggctgaaggcggtgaaaggggcggcggcctcgggtgtacggtgggagtggtgctcgaggggtggagagggggaaataagaggcggccggacttccccttgcggtggcgaagctggcggtggcggtggctcggcgcggcgacggctgtggcggcgggaaacggcgaccgaagctcgccggagtgtggcagcgcgtgggtgcggcgtggggagagcgagggagagtatgccgggctcgggaaaaaaatggggaaacggacgaggggagcacggggatgctttttatgggctcgggaaggcgggatcgaggccggacgtggcggaatcggccggcgaagtggagcgccgtcgtggggtggtggaggggttaaccggcgccgtttctagcggggtgagtgggggaaaaggtggaggacgtggagggggtcgtgtccatgtggttggatgcgagctcgggtgcgggaggtcgccggattttgcggcgacgtggggcggctcaggcggccatggcggttgcagccggccagccagaggaaggaggaggagctgacgggtgggaccgccggtcccacctgtcggcgaagggagagaaggagggacgcaaaacagacttttgcaagcgggccaaggaagaagggagccggcccgagagagggaggaggcgcgcgggccgcgggagaggaaggagggggaggaatttgggccgagcccgaaagggaggaaggggaagtttaatttgttttctttttattttaattgatacaatgatctttgtgttattaaaactatttctcgagctccgaaaattcacggaaaattccggagagtattttagggcacaaagaatattgcaaaatattcccggccaatgatttttaagggaaaattttaattctcccattatttcacttgattaaattgattaactttttattcaatttctaggaaatgcatcattaaatgatttttaatcccgaacgaaaatcggggcgttacagcggcgtgacaggaggaggaagaagaggtcagcccattccgacgacgagggtcatgtcctcaccgtcgagggcgcttcgcgggccacccgaaaggggaggcctgcgagcgacaaaaagaaggaggccggcgctcccagtagggagcgcccaaccagcaagtggtgcatcgtccacaacacctcccttcacgacctcgcggactgccgcgcagtcaaaagtttggctgagcggacgaggaagtgggaggaggagaggaggcaggagcgccgagagggcaagtccccggcggttccttctagcaatcggcgaagtgaggccaagcagaaggcccccgccgaggacatcgatgacggcgatgatgacctaggtttccaagagcccggggccaccattgccactgtcgatgggggagcgtgtgctcacgtttctcgccggagcctcaaggccatgaagcgagagcttctggccgcggcccctactcatgaggcgacgcgccgggcgcggtggtcggaggttgccctcaccttcgaccagaccgaccacccatcgtgcgttgcccggggaggacagatcgcaatggtggtttcccccactgtttgcaacgtaaagctggggcgtgtcctcattgatgggggagcagccctcaacatcctttcccccgcagcctttgacgctatcaaggccccggggatggtgctccggccgtcccagccaattatcggtgtgacgccgggtcacacttggccgctaggtcatatcgacctcccggtcaccttcggtggatccgccaacttccgcacggagcgggtgaactttgatgtggcggacctcagtctgccctacaacgcggtcctagggaggcccgcgttggtgaagttcatggcggcagtccactacgcctacctccagatgaagatgccgggccccggtggccccatctctgtccatggcgacctcaaagtcgcgcttgcttgtatggagcagcgcgcggaccacctcaccgccgtgtccaagcccgagggaggcgacgagaggcttggcacctccgcccccgccgccccgaggcagcggatagtcacatgcgacgaggtcccggtcaaggaggttgccctgggcgacggcccgtccaagaccacacggatcggtggtcttctggacggcaaataggaagacgcgctcgtctctttcctacgggcaaacgctgacgtcttcgcatggagaccggcggatatgcccggggtccccagggaggtgattgagcaccgtctcgccgtgcggtcgggcgcaaggccggtccggcagaaagtacggcggcaggccccggaacgtcaagccttcatccgcgaggaggtggcgcgacttctggaggccggattcatccgcgaggtcatccatccggagtggctggcgaacccggtggtcgttcccaaggcgaacggcaagcttcggatgtgcatcgactacaccgaccttaacaaggcatgtcctaaggacccttaccccctgcctcgcatagatcagattgtcgactccacagcggggtgcgaccttttgtgttttctagatgcatactctggttaccatcagattcgcatggctagggaggatgaggaaaaaactgcattcattacccccataggaacttattgttatacgacaatgcccttcgggttaaagaatgcaggtcctacttttcaacgtactactcgaatttctttgggtagccaaataggacgtaatgttgaggcttatgtcgatgacttggttgtaaagacgcgcaaccaagagaccttactctcggatctagcggaaacttttgagagtctccgctccgcccgcataaaactgaaccccgataagtgcgtgttcggtgtacctgcgggcaagcttctcgggtttttggtctctgcccgaggcatcgaggccaaccccgagaagatacgagctatagagcggatgcgccccccccagcaagcttagggatgtgcaatgcgtcaccggttgcatggccgccctaagtcggttcatatcgaggctgggagagaaggcgctacccttatttaagctcctcaaacgctccgggccgtttacttggacggaggaagctgaacgtgccctcactcagttgaaggcgtatctcagctctcccccagttctggtcgccccggagccaaatgaacccttgctactctacttagcggcgaccccgcaagtggttagtgcggcgttggttgtggagcgcgatgaggacaatcctcattccgcgcacccccaccctgtgctggcttggcccgggagagagcagggaggagagcccccgagccgaacggtggcccaaggcccccgacgaccggagcaggccctctgcccgcttgtcagacggtgctaggtgcccctgacccccaggatggcccgagggccactgcgggaaggccgcacctatcgccctctgaccccgaggctaaccctgtgccgactcgacccgggagagagcagggagaagaggcccccgagccgaacggtggcctaaggcccctgacgaccggagttggccctttgcccgcttgtccgacgacgccaggagcccccgacccccaggacggccccgaggccactatgggaaggccgcccctgtcatcctccgaccccgaggtcgtcggcacagaagacgagtgcaccccgcgaggccgcttggacaaagagcgccccagggatgtggcccctagcgaagaggatcggccccaccgaaaggtgcagcggcccgtctactttgttagtgaggccctccgggacgccaagacccgataccctcaggcccagaagatgctttacgctattctgatggcttcgaggaaactgcgccattatttccaggcgcatcgggtcacggtggttacgtcttaccccctcggccaaatcttgcataatcgagagggtactggacgggtggtgaaatgggcaatcgaactttctgagtttgatttacactttgaaccacgccacgctatcaagagccaggccctcgccgattttgtggcagagtggaccccagctcccgagcccgtctcagtccccaaggccagctcgggcccctcgcagctgcctcacaccgcccactgggtgatgcagttcgacggctccctgtctcttcagggcgccggtgcgggggtcacgttgacctcgccgagcggagacgtcctcagatatttggttcgccttgactttcgggcgaccaataatatggcagagtacgagggactccttgcgggactcagggtggcagctggactggggatccgccgcctcctggtgttaggcgactcccagctggtcgttaaccaggtctgtaaggagtaccggtgctctgacccgcagatggacgcttacgtgcgccaagtacggcgtatggagcgccattttgacgggatagagcatcggcacgtgtccagacgggataacacggttgccgacgaactctcacggctcgcttcctcgcgagcccagaccccaccgggcgcctttgaagaaaggcttgcccagccgtcggcgcgacccgaccccttaggggagacggacgcgcctgataggcccccgatgcccgtcggagtccaggcctcgggacccgaggggagcgctcccagctcccttagattgattgcttggatcactgagatccaagcatacctcacatataagactctacccgaggactgcgaagggagtgaacgcgtccagcgcatctccaaacgctacgtgctggtagaagggaccctctatcggcgcgcggctaacggaatcctcctgaagtgcattcctcgggaacaaggcgtcgagcttcttgccgatatccatgaaggcgaatgcggagcccactccgcctcgcgcaccttggttggcaaagcctttcgacaaggtttctattggccgacagctctcaatgatgcggtcgacctggtccggcgatgcagagcgtgtcaattccacgccaagcaaatccatcagccggcccaagccctgcagatcataccactttcatggccatttgctgtctgggggctcgatatcctgggaccgtttaggcgggccccgggcgggtttgagtatctgtatgttgcgatcgacaagttcactaagtggcccgaggcttatccggtcgtcaagatcgataagcactccgcacttaaattcattaagggcatcacagcccggtttggagtgcctaaccgtattattacggataacggcacccaattcactagtgaacttttcggcgattactgcgaagacatgggcatcaagctctgcttcgcctcacctgcccaccccagaagcaacggccaagtggagcgcgccaatgcggaaatcctcagaggccttaaaaccaagaccttcaacatcctcaagaagcacggtgattcgtggatcgaggagttgccagcggtgctctgggcgaaccgaaccacgccaagccgagcaaccggggaaacgcctttcttcctcgtctacggtgcggaagcggttctcccatccaagctcaccctgaggtcccctcgggccaccatgtactgcgaggctgatcaagatcagcttcgcagagatgacctcgactacttggaagagcggaggcggcgcgcggccctccgagccgcgcgctaccagcagagcctgcggcgctaccatcagcgccacgtccgggcccgatcactctgcgtcgacgacctcgtcctacgccgcgtccaaacgcgtgctggattgagcaagctctcaccaatgtgggagggtccgtatcgagtgatcggcgtcccccggccgggctccgttcggctggccacgggcgacggcacagagctgcctaacccgtggaacatcgaacaccttcgtcgcttctacccctaaagggggatcgggtgtcaggtttcgggctcgggccaaccccgcacccccctcgggcgtgcagggttggccgggggctaccacatatgcatattcttatttctcttatatctgtatttcaataaaagcattttcgatttcctaaaggctgtatctatgctgttgtttccttttgaaggattttgacttgaaataggtcactcgtgttcaatcctgccctcgggggctcgggtcggctaaaatcgccaaacggggcccagaaccgagccgtgccccggggcgtggtgaactccgggggggaatcggcaaaaacccacaatcgggtcacccataaccctcggtcaccacgctcccggcctggccagtctcgacatgtggatctccccaggcactagccccgacccgagccatttgagggctaggacctgggcacgagcccttgttcaagccaagacacaaaaggaccgcggcacaggcatcctcgtctcatacacacaacaaatagaattgacaaaaaatttcctctttatttgattgcagattaaattagtctatacaagaagggggcccgaaggcctcgaaagaagaaactatttaaagattggcgggggcctgggggctcactccgatgcacccgggtcgccagcctcgtcgccactgtcgctgtcacgcccagaaatttagcccaaatttccagactattttgtgtattaaatccctgtccaggaccagccagggtacacaaaacgacaagtaatatacagttccaaacgtaaataaagcgtaaaatacttacaaaagaggcacttagtcctcgcaccgaaacaaaagcagcagcagcggaaaaaggcgatcctagcggggcttcagctccactccacaggcaaaactcaactggggtctgagccttggtcttctaacttcgtcttcaactcagaagcactacacttctgaaaagggggaataatagcaaggctgagtacaaccaccgtactcagcaagccacaccaacgatgcagacgtgcaaggggaacacaaggacggtttgtggctatttgcataaaggcggttgtaaaacattttattgagcaaaacagtaaaactgttgagtaattaaagtaacattaaaatctccactgatcaacgctacaccacgttgaacaggcccaaccaacccacctgtactacagtgcattgggtcgatttattaagtgtgagactaatcacggtgaatctggtcgatcgcccataaccgcgggcacggctattcgaatagttttactctggccagaggtgcacaactgtacccacaagacacaacccaccgacatgtcaccgcgtcatcatgtgcccatgatgcacacgtcaccgtgtcgagtgattgtgacgagacccttcgcataaccctcccctaaccatccacaccacgctaaggtttcacccccacccctcaaaaggcagtgggcggtcccctcttgcgccgcggtgaatccggcagctggacaaccggacaccccggccgacccaactccatcacgcccaccctcgccaccggtgcctaggaaagggtcgagctatacttcagatcaagcagttacccattcccgcttgtggcaagcgctgtaagtcttccagggtttcccgtgaaccggtccttaattgctatgggtgcgactcgcaaaaccatgcacccacagcccaccattcagtcgcattttagttggataattacgaccatgaaacatggccagatgtctcgagcacgcggctcaacaagatactagaaaggtctaatactgcaattatcccatcgactgagctagtggtaattaagcatggctaagcatatagttctagctaggtcacataagtaacacgagctagtcaatttatcacccaagtttgacaaaggatagatatcaagtaaacatggcacaagcgagcagataggaaaaccctgatcccatgtaattagcaaaacatgcatatttatttgtaaacggtaaaacatttataaattgggatcaacatgctcaaggagaatgtgtgacttgccttgcttcttcactttgatcttccgaactcttttcctcgcgaccgcggacttccgaaacgacggaaactacacgctggcacgcaaaacgaggaaaaactctaataaacaccaagaaaacagtacataaaaagtaaacaaacatgtagagctcaattttagatgaattttgcaagttgaatggctcaattcggagttcgaatgaattagatatgaattttagaaggttttgagccattttaatgaatttctagaattattaccgatttattgcgcaatttaaatcaattatgacgtcatccgacggggagaggtggcgccggcaagcgggccccacctgacggtgactcacgggtggcgggcgcaccgtggaccgagtccacgcacgcgctggtccgcgggcgcaccacgtggcagacacgtggcggccacgacggacggctagcggaggtggcgccgacgtggcgccacagaggcaccgacgcgggcggcacgggaaggccacgtggacggcccagatcgccccgaaggaggatcgggcggccacgggcgagcgggagccagctcaccggtcggccggccgggagcgacggcgcacggcccgatggtcgccggcgacgaccaccggcgcgacggcacgcacgggaggcgacgaaaagaggggaaagggaaaggagatgaagggggtcctcaccgaggagcgccggcgacgggacgaccatggggaggcgaccggcggcggaaaggatggcggcggccgacacgggaggcgacgggaacggcggtccgacgacgcccgaccatggcggagccgcggccgagggccggcaagacctagggaaattattggagcggttagggagggaaataggcgaccggagcggcgagaataccacgccagagaggagaggaatggtggggctcaccggcgaccgagagataccacgttccggtgggtttccggcgatgaacaacggtgaccgaggtgctgcacggcgctgcgaggcgagaggtgaagacggagcgacgcggcggcggctaaggcgacggtggcacacggctggaggcggcgtatggtggaggtggctcgggatgcacggtggaagcggcgttgcggcggtggattggcgaagaggagcggtggacggggtgcgcacggcgactgcggtgccggggagggcgacggcgcagtgcggggtggacgggagcggcggcgcggcgctgctggagttcgccggagagcggcggtgcttgggctcggcgcggggagagcgagggagggcgcggcggcttggggaaaatggggaaaatggatgaggggagcacggggatgctctttatgggctcgggaaggcgggatcgaggccggacgtggcggaatcggccggcgaagtggggcgccgacgtggggtggtggaggggttaaccggcgccgattttcgcggggagagtggggggaaaggcggaggacgtggaggggatcgtgcccacgtcgttggatgcgagctcgggtgcgggagggcgccggattttgcggcgacgtggacggctatggcggttggggtcggccggcgagaggtaggaggaggagctgacgggtgggaccaccggtcccacctgtcggcgaagggagagaaggagggacgcaaaacagacttttgcgagcgggccaagagagaggggagccggcccgagagagggagaaggcgcgcgggccgcgggagaggaaagaagacttgggccgaaaatggcccaaagagaggaagggggaaattttatttgttttctttttattttaattgatgcaatgatctttgtgctattaaaactatttctcgagctccgaaaattcacggaaaaattccggagagtacattagggcacaaagaatattacaaaatatccccggccaatgatttttaagggaaaattttaattctcccattatttcacttgattaaattgatttaacctttatttaatttctagaaaatgtattattaattgatttttattcccgaacgaaaatcggggcgttacagtcgcccactccgccgtcatcgtcctcctcgtcggagttgagggcgaacgcgagccgaggggccgaaccctcgaagctgtggacgatatggtcggcggcgtcccggacctgcgcgcgcgcgccatcctcggtcccgggagggaactcgtccagcgccgtccatggggagaagtcgggatccctggcttggtaactcgccagtacgagctccaccgctcctcgggcgaggtccctcgaggatgacttaatcgtcctctcgagctcctcggggagccgttggagagtcccggctatctccgagaggcgctgggcgaggcccccctggttggcggcgtacttcgcagtccgcccgccccagaggcccgcctgccggccggcgcggtctagacgggagacggcgtcccgaagcatgccgggccctacctcgcctgccaagcggagggcctcgacctccccggcggacgagtctagcgcgccctgcagatcggcgatggtgtgttcggcagctgcgaggcgggcggttaagtcgctttcgcccgcggccgccccgccgctacgcgcccttgcatccagctcccttgcctgcgcctcgagttcagcggcccgctggttcagtgcggccctctcggcgcgggcactttccagattgcgacgcgcttgttcctcttgcgcagcctcgcggagggacaggctgtccgccagccattgcgccgcggcctcggcctcctcgagagctcgctcccgctcggtgagcgcgtcctcgcggaggcggagcgcggactcttcttcggcacaggcggcttcgtgcaccgccagtgtgacctcccgaatagcaacggcggcctcgcgatccgccaggtccctctccacggcgcaggcacgctcttccagcgccatggcacgggcctcaagggcttcttcgcgccgccgggatgccacctcggtctccgccgcccgccgttctcgggcagcggcagcgtcaaggaccccccgggcggcgtcgagctttttccctagctccgcctcccagctcccgtattgaagacggagggtgtcctgcgcctcgttcatcatggtggtggcgatgagggcagccccccgctcctcctccacctccttggcgatctcccccagcaccttccgacgggcttcgagctctgagacgtgccggcggtgtgccttgcggcccacctccaccatggcctccaccgagcttcgcccctcttcgacacgcgcccatgcggcgtcaagctccgcccgctctgcttgcagggcctccacctgggcacttaacccgtccaacaccgtggtgtttgcgacggccaaggcctgcagaaggggttctgcgctcagtggagcaacggaaggcgtggggaagagccgcctcggtgaggatgccgcgcggctcggcccgccgatggacgtgccggactcagggatgtcccccggacctggcttgtcctgagcgtcgcccgagggagtgggcccaagcgatgcgcccgcggcctcgtcgcgagctgcctcggaagtcgtcgccgcctcggcctggcgaagtctggcctcctcccgagcggcttcttcagcttggcgagctcggacggccacctgggcggcctccccggcttcccgtaggcgatccgcggcttctcgccggtcagattcccgcctccgagcctctgtggtcgccgggtcctcggcctcagactggccggacttggaatggcgggaggaacgcgacgggatctcgctgaaacagaagaaagaccagaagacaaacaagatggatgagtgaaaactcgcgttgagggaatgaatacggccacgatgggcgtgggacgaacctgcgagggggtcggttaaacgaccaccttggaggggaaatgaggtttccccgggatggttctgtcccccccatcttgcggagccgtttcttcttccgctccccctcgggctgcgacgtcggcgtggccccctccgggcgcctgctgctggcacgcgccgccccgccccctcggggaggagatgggggaggggttccttcctgcttcctcttcccccgggcgtcggcagggcgaccgctccccgggcccccgtcacggggcccagaagcacgaccccctcccggggtagattgttcccccctgcggctcccgcccgcgccatcgtggcctcgaggagcccgctcctccgacgccccgaccgcctgcatgatggtcaggatggaggcgcggtctggatcactgcagagggggaggactccttgaggaatgagggatgcctccacggagctgagattcagcacccgttggaccactatcttgaagtcctcaggagcccagtcccatctgaccccctggtgggtcctcatacagtcctcggacccggtgtactcccaggcgccccgggcgcgccgctggagtggcgcgatccggcgacgaagatagtcgccgaacaccatggcccctgtgagcccctgggatcgcaggcccgccaggcggtcgaggacggcgtcgtagccatctcccagatctaccggcgcccgccagttggaggcctgcgctggaggctggctcggaagtcggaggcgcgcttcgtcggcgaggggggtgtagaatcagtcgctcttccagtcatcccacttcttgcggaggacgcagggaatgtagcggttcagcaccggcccccgcggctggaagtagcaaccaccaaccaccgacggcggcgacactggctgtacggtgaagaactaccggaacagccgaagggatgggcgcaccccgatgaacatctcgcacaggtgcgcgaagatggccaatgtcattaccgcgttgggggtgaggtgcgccatctggagatcgtaaaactccagaacatccatgaagaaagaagaaaatggcggaaccagccctgccatagcaaaagggaggaagaagacggaccgccccgggtagcgtggcgccgggcatccctcgcccagccagactatctcccggccggtggcagattccggcatgaagcggcgcggcagcccggcctgtctctcgctcacgatgcgggaaggcggcagcacgctaccgtcaagcggagcggagccccgtgccatgacgccggaagaagagatgtttgagagcgagcgcgtgtggcgaaggtagggcacaggaaacaaggagttagggcgcaagcggcgaagacaaggggaataatggcgaaaggaaggaagcaaatctcttcctcgacgactttatacccttgccaacgctgtgcccggctcctcgtttctcgcgcccactatcttgccccctcgtttctcgcgcccacgcttccactaatcccattcgcccgtttgcggtgcatgaggtggatatgcggctgtggcagtcgagatggaacatctcgtgcgcgcgttaattacgctcgccgaccgaagcgccatcaccatatctccaggaaaaacgaaccggcttgtcccgatttttagaccggccccacctgtcaccaggccttaagaagtggcgtcacgcccgaccgcttccctcgaggagggcgatcgccctggcataacgccgggggctactgtcggtgacatgggaccgggagtatcatgacttagagacttgaggcagacgcgatcacccacggccgcccttctctttgtctccccgaggggtcggaccgctcccgtctcggccgcgagggccgaggcgccccgaccccttgtgggttttgcgccgcgtatatggggtaggtgagcatagcggggctcacctaaccacatttattgcggtttggacgagcgcgtcacgccgcatgtaacgcagtgcagcgcactcgtttatccggtctgtgaccagtcacagaccgatcagatcgtgggttaggtggcgacaggcggtctgacgcacgcctcgccccatcccgtcaggatgagagcctccaagcactcgtccctagccggagccggcgtgttagctcctggagatggcacgttggtcccggtcagatatatgccaggcttcatcctaaccattacaggcaagatattgtatgaagaagggcgaacatgcagattgttaaactgacacgtggtggacaagaatgaccgatttgtgaccggtctgacaatggtcatgtcgtcagcagacagccatgttcccacgtcgcgcctgcttccggcggaagtggaggtaggtatgggccgtcccatcagaaggtcattcggacggcagccatacaaatctccgtccattaatgaagagaagtcaagttggagggaagagaggatgagtccccacacaaaagaaagagagggagagatggtgcatgtggtatccccttgagatataaaaggaggaccttgcccacttagagagaggggaaaaacgatcccagaactatcgggggctggctcgcactttgtagcttcttcatacatagatccaccaaaacacaggagtagggtattacgcttctcagcggcccgaacctgtatacatcgcccgtgtcttgtgtgtttccattctcgcgaaccttccacatacagactaggagcttagaatctcacccagggcccccggccgaaccggcaaaggggggcctgcgcggtctcccggtgaggagccccacgctccgtcagggtggttatgccttatattttggaatggagggagtaacaagtactctcactctctctcaagataaatttatctttaatcccttccatacatatcaattaagaaaaatactaaaataccctcacattatcaaatcctaatacaattatccttcactttctctactcccaatatatctgtcccttgcttttacaaacactaatacattgattattcaaagataaacttatttttttaaaaaaagtaaaaataatcatataaacttattttaagaacaaaaaagggtaaaaatgatcatgttttagtaataggatgaatatatatagcatttggaaatcgagaaaatattaaagacgccaaataataagaacggagtgattaatctcgctaagagcaagtacaatacacttttttaaaaaaaaattatttttgtcctctttcaaaataaacctaattttaagtaattattgtattggagtttataaatttgggaacaaatatattagaaatagataaaatgaaaacaattattctaggatttgataaaattaagatattatactctctttttttttcttttatactgatatactactagttcgtgggatgggcaaataaataaataaaattatttaggaaccgacgtactgcccactagaaccaattgttgccgctgttgtgcctagctgcactctgtctgcatcagccaccaacccctcattggcatcagagatcagattcagagtcacacagtatttgtactcgccatcaggcccatcaacagcaccatgccagattgttaattactcacgcacgaattcctaggccatatactagtacacatctccaagcccgtgatggccaagcagacagcagattaagaaacagagaactcatctgatttgtgggtttggttggtagtaagttgttggttagggcctccctgacagacagcgttccaatcagtttggtgatcacatttttttctcatcagagcttttggttttgcaaccaatggcccctcttggcgatacagcatctgatgcttaatcttctttaataaatgatccttcctcattgtggttcaacacgcactgtaacaactgtagtgttatttgacattttcatccctaacctagttagtatttttgtaaatatttctcaatatctgcaatatattcgcccttgtgaatatgtccatcagagttgagacctcctaacttcccctttgaaacacaggcgttttacaaacagtttatacttcgtaagtgatataaatcttttctatgattgcgaaaagtaaaccagatatggctcgaaaaatggttgccatttttttgaatgatactttttcctaaatcatagagaatattaagggtataactgcaaacacaaaaaaatgtaggaaagtgccccactaaggccaagagcccaccaaaaaatttttttcttcaatttgcaacctgcactaccaaccttttctgcatcttgcttatatttttgccaaaaaaaaagaaaaaaaaaagagagaaaggagccaccaaacccagaacccgcagagaaaagaagagagagagagagagatcagaggagagagagagacagacagagtgcggcgccgaggaggagaggagcaataatccaattccaatccattcctccgcgacctcgtcgtccgatcatggccatggccgcctccaggttgctgtgggcttcccgcgccgcctcctacctcaagatctccactttccccagggccttctccaccggtatctctctctctctcttcttcttctctttcggtttcttgttttgcgtatgtatttttcgtattctgtggtctgtatattcgtgggatcacgcgtggttggtggtggaatggcgtgatctcgttgcctgttcctcgcaaagattggattttgggggcaaggatcactgttcatcttatcttcttttattttgggttcagttggtggtttaggctgtgaatccgtctgcgtgaatgggaaatttggttggtctgatttgatctcttttcggcgaaatgtttcatcttttttttttgaaaaaggaatcttgtgtgattgttcctgctcttggtaacagcgtgtgcatggcaggtttatgtttctgcatttggatatgtgaatgttagcacactgatttctgaaattcagattagcctattgtatgtgttgatgaggaaggcaaagttttttttttagcctaatttctttctttgtcctgtttattcgaagtgttaggacgtttgacaccaacatatgaagcatctcaggaagatgcttttagtagctattaggagaaagctacctaccgaccaataattggcaatattgttatccaatatgaaaatgttacaataccacggttgtttgtttatgaatttaaaacttgtgttgctaaaatggtgtgccacaatcacatatttacagatctgaattaggcacaccaaggaaatgaattaagggaaagtcttattatagcagactttggttttaaaactttggtagtaggaaatgaaaaccatatggtaaaatatttatgcaacttaagaagtgacaaatagtcaattgttaatttgcctggccaagaggctttggtttctaacaagcattggacaaatggtcataggaaaatacacctaattttcagtttataaattggcttctaggggggggccattaattccagttgttctggaaatttcgtatgctttctgtggaaaccttgtttcctcactgccaattcagtattttacacatctgatgaagttgtgcatattgcttgttttctatttttttcagtgctgaaggatctgaagtatgctgacactcatgaatgggttaaggttgagggtgattcggcaaccgttggaattacagaccatgcccaggttgatctattcatacgttatatcacattcattgcttcattctgtacatacgcataatataagcattccatttcttaaacattacagggttccaatatatgttatcatgttcagtacatgtagcaaggactagcagtgctaaagttgatcatgtgttgtttttttttcttttttttgcttccagcaccatttgggtgatgttgtgtatgtggagcttccagaagttggcagcagtgtatcccagggaaagaactttggtgctgttgaaagtgtgaaggcaaccagcgatatctactctccagtatctggagaggtggttgcagtgaacgatggactaggcgatgaacctggattggtaacttttaattgcgtaatagatcattgtgagtagattgaacacttctatgaactgtgttttttttttttttgcataggttaatacaagtccatacgagagtgggtggatcatcaaggtcaaggttagtgattcaggtgagctcaattcattgatggatgacgcgaaatactcgaaattctgcgaggaagaagatagcaagcattgaacaaataccagtgacttgtgatctgcaaagaatgcgccttgacccttttgtcaatgcttgtgatgtgctatcgagcacttatctttaccaccggctgctcctgaaatcagcaccgatcaacacatgaataaattagtgttggcattgcctcttccacaaagagttgcaaacttcgaacctgtaaatgacatgagtttcgttatttctttgtagtatcgcgtgatttcatcttcaattgtagctctgccgcctctgctccgtttatttctgaaacgtgtgcttcgtttacttctgaatcgtgtgttcttggtgtctacgagcctgcattatgctgaggaattggggatgattggtagtagacgaatagctaaatataaattggggatgcttgattgcttgagaatcgtcaatatttcagaattaggaaaaaaaaactcatcccagattatggccttacttttcctagatcctagatagtctgcaattctacagctctgttcttagttcttacattatcagtatttacattcaggtgatgagaaagaataggctacttggaggattccctaatcacatagcaagttcatatcacaattcacatatccttctgtcatagaacatggacgccaaaattatcaaatgacacaaatggatgtgtaaaatcaccacgagaataacaacatatgggacaaaaacagtagatacttttatcactataagtatatgtcaaacttaagtgatggtcagcaacattagtgaacagtgatacagaactaatatatatgaatttagatacaaaaacctaggcgatgaagataaatactacccttagcctgacagaacaatgtcctcaacaaaatacagaaggcctcaggttgcatcacactttgatgttccacttgtgtgctgaccgtggaccacgagtgatcccctcataatattgggatggaagctttcctttgttccaagttttcacaaacttctcgaacagatcacgagcagactccgaagaaagatcagagaaaaatttgcctttttcttccttcaaccaggttgcgaactcattgttctttgcgaaatagtcatctttggatatttctttgaaatcctgtttcagtaaaacaaaagaacaatgataagcatggtctcaaggagaaaggaaatggagagctcaaagggtgcagtatgccattatgtatgttctcaacagtttaatacttccccaaaattgttgttagtctcaaaaatataaatggcatacatgatacaactcctgtccacctgtccagatacagataagccattctggttcttgtgaactgtgaccttaaacaagtacctgacttggtatcactaattttcatcacagacacacaaaaggaaataacctacaaactgatatcactaattcaattcgatggcaacagcaaaaaaaaaaaaagcttttcctttatattcagtcttcagagacaaaatacattctggcaagcttcagcaaaatttcattgttcaggaaaacaaaaggggctcctactcaggctgggtaagatggctacagaacatataccagcccggcgaaaaaaaatggtcgtaagaaatctgcgataatctatccctgattcacgcactgaagaattaactgaactagggacgttctccagtttggttctacttgtaaagaaaaaccaacctcgttccagtaccatagttatacgaaggctcaagcttgtagaacaattcatatatgaaaaaatgtggcctaaatagcctattcagatagcttaactgctaatatgcaaaatcatttgattgatgatgcccagtagattcatagcatcattcagacttagagaactcacatcatccttgtgctttcgcttgctcttctccttctccttggaatgcttctcctttgaatccctctctgtcaaaatcacacacacacacacactgaattactgacatacatcaaagctaatatagcaggtacgagtgtatcctcagcataatttgcacacttccagaatagttgagcatgatttcaagtaagaacaatataactgttttagaacaagaaatcaacaagtgccactgccaagccgtgaaggcaaaagatgaaccctagttccctacctttgtctttgcccctgtcgccatgcttcttcttcttcctcctgcgcctctcctcctcctcctcctcctcggcttgttcgtctcggctgctcctcctgctctccttcttgtccctcctcttcttccgctccctctcctcctcctcccctgaaccaccaaacgcaccaagaagattggcaaaatcaacacgcggagaccagatacgccgatgcctcgagagggggggaatggatagggggcctttgagcacctgacgagggtgacgagcgccgcttcctcgacttgccctcgccgcccatcgtcgccgccgccgccgccggggagaagaatcgaagagggggttagctcaggtgaggtctcgggacgggtttagttggtattacagatgagtccgagggctcatatgcaaaattgtcagaaggctttcgggcgcggtcgatccaagccgttcacgtctcatccgacgttggggagagagtacagcaatacgaagcactcacgctctacctaggcaaatcgtgtggttaacatcaagtttatggttttgcgtaaatttcaccctggaacacattttattactgaaattttcttttgtaccacactttcatcgatttttttttattttggatcaaatgttaatagtcttaccattgttatactctagaccacaccgactctcttatcaagtatacgaatgatttcgattataccagttactacttgtcattgaactcaaaatatgttgtacgaagtgagtgctccctttgtccaatgatattataatcatgaacggattagacctatcctaaattgtaatattttgagatgggggaaatacttagaacatgcatctatgtcctctttgcgaatattaaaacatattatttattcctcacattaaaaaaacgttttaaaaaatttcccacttgtattatttaaacaacttttcaaagctatttgtcaagtttattttttaaaatatttaatttatcattataattaaatagataattcgtaccactaatatgtccaataatctaagtactggtactagttaattaattaggtagtaacaggtaatctgcgtcataatttatagttcaaccataattaacaatctacagaaatggcattaatcctcaagtaaattaattaagctttgtcgttgtgttacatcctaaaaacctcaatgatctctctgctaattaaccatgcaaatgcatggagaccttaatatccaactccagttcagtagttcacacaccaacaaatcaaaaggtacttagcagctgtactagttaactaggtagaaaagcttgattattctgatgtgctaattagacacacacacacacacacacacacacacacacacacacacacacatatatatatatatatatgtccagaacgatgaacaattgaacaacacagcaacccaactcgatcgtctatcatcagctgatcatgcatcttcatggtctccaagttactcctagctcccagaatcgacaatgccatcatgtgcttaattagcaagcaatcatctagatctctgcagaatgatatcaatgcatgattaattcgcagctgtgttgcgatgaattatactccctccgtttcacaatgtaagttattctagcatttcctacatttatattgatatatatatgtattcattaatatcaatatgaatatgaaaaatactagaatgacttatattataaaacggatgaagtacataaactagtagataaaatcattgcgatatatatattcacatcacacacctgatgagagtatcaggatgtgccatgtatgctttgcttcgtttgttcttaccacagctgcaggccgtggccggcggcggcggcatggaagctgctgctgctgcagccggggtcctgcaggttgggctgcgtcggctgcagccggaacccggcggcggcggcggcgtcgacggcgtgcagcggcggggtgagctgcagcgcggtgctcgacgactcctcgccgtagtacgccggcgccgccgtcagcatcgacagcaccggcgccatctccaccatcgccttcacgtcgccgccgcccaccgccgcctgatgatggttctcgttgatctgaattcatatatagtttcatgtacaagaatcaaccaaacaccataattaatgtacatatatgtgcttcaagaatcaaaacattttaatgaattcttgattactgattaactaactatacgtataccatgcggcacaggaagctgttctggtcttccaggatgtgctcctgttcatcaatttcatgcatagaattgaatcaatcattttttttttcatcatcatacagcaaagtatttggtgtttcatgatcagtttagtagtgcaaattaattaccttgcgacgaaggttgtccagctgctggttcaggagctgatgctgcaacaagcaagaattaatgtgaaacaactattttttatttttttaacgaatcggcacttagatacacctatttcattgaatataacaaaataaaaaacttacgaaagcaaagctttacagaaaagaggaaaaaactatgggatcaattaatccctaaaccctaaacttaccatttaccattgaatcagagactgatcattctaaattaactctgaagaatgattcattcatcaaatactatcttcttaatcaattactagctctatttcatattacaagtcattttaattttttttcttttaagtttgattaaatttatagaaaaaaatagcaacacatgtaataccaaattaattttattaaatctatcactgaatacattttgataatgtttgtttttgaaatactaatatattttttataaacttgattaaacttaaataaatttgtaaaaaaaattaaaacgacttataatatgatatggaggaagtaattacctttctcgcacggactttggtgacggagaattcgagctgctgctcgagatcgttgatgtcggcgagcgtgaggttggagaggtcgtcgccggtgaacctcctgatgccaccgtccagcttctccatctcgttcctcatccgagtcatctccacaaatatttgctatatatatgtgcacattaattatatttgatcagtgcatttgaaagaaaatttcatttcaactgctggcagatagatcgatatatattctgatattgatcagacattgtgttgctgattgtaaaattaatgtatacctgatcgtggttgatctcctcgaaatgagtgttggtgacggtctggtaatgctcgatgagttccctcaaactatatattgtcaaacattgaaacaagtaccttgattagttgtgagttaattaatactttgataagttcatgtatctaattggaatggtgcatgtgtaattcttttgcgcattcaaaaaagaaatgacaatctctgatgtacaaatcagatggtataaattaattttgtagctagaattttctcttggtgatgtatatacttacagagagtatattattttagatcaaaatgaaacaaacgaaaatttcttaactaataacaggaatgaacaggggatcggaagaaagaacttcacatgaatattcacatattaattaactataatatgctgcagaacagtataaaatcatgtgagaaacgtctggggatcttccggctagctccacaaagtggtggactagacaaccaaggttcgaaacctcacctcttctaattatttaatattaggtcattctcttatattcgcatctttttttaagtataaaaacatgcataacataagataagatatggtcgtactgtcgtacacttgttcaaattatattccctgttgatatacatcttttagtttgattaaattagccacatatgaaatagttttttggggaaatccacctaaaaaacccagctcgatcctagaaatcattagaaagagggaaataaggattaattaactagttgactataaattcaggatcaagttgcaaatctacatacatatatgttgctcagagatgtaaaagacaagtgcgtaatcaagtcacaagagacactagggcatatagatcattgcttatgtatgcctttgatcatgatttaattttgtaatagattcttggctcttcgaaaatatatcaaaggaaactgcagatgcatacatatacactgaaaatagttaaaatgaaggtaggaaaaactcgatcgatcaggagttcaggacaagaaaaatagttcagatgaagaataaatgcaaggcatccatccattatatgaacagatcaaatgatcataattaaacactcttgcccaaagaaaacaaagggtagaaactgcatgagttagttaattttctctgaaaaacaaaataaaggccgagagaaacttagccgaaaacttaatctcttggttgacaaaaaacaagaaattaattaacccatcaaatcaagcactaaaaagagaacaagagacactaagctggagaaaggaaagattgaacagcatctgataatataagagaacaaaacaagaaccgtacctgcaggtagggctgcagtactcgaacatcttgccggtgctggagaagatgacgacgccgacgcgggcgtcgcagagcacggcgagctcgttcgccttcttcagtagccctccccgcctcttcgagaatgtcacctgcctgttcgtcgcgttctcgatcctcttgatctcgatcttgccgcgccccatgcctgctataccttcctgatcgagtttaatttaatttctgtgttcttttgtttctccttcttctgcacaagaggaaactgaagaagaagaagaagaagaagaagaacagaaatggccaagttatgaacatatcgatacatggacgaattttgttaaaatcaacataaggcatgggtgctcaaattggatttccccccacagctatgtaaagggtgcaatcagaagtagaaaaaatttcatgtagagaagagaacaactagtagctagagatgtaaaaactctttgctgcgaaaggatgaagaactagctagaaaaggtgtccttttttttttcttgaattactcatgaacagggtagatagatagggcaggagtagtaatgtgctatgtacataccttgtgaagtgctaagcttgcttcaaaggctaaggcaggaggtgcagaaggagagacatatataggagagagagcttgtagtaatgtgcaacacacaatgctttctctctgtcacacactctcacactactactcctgcaaatcaaatcagtgtactactccaaatcaaatcaaaagtagatggagggagtagtaaatatccagaaagcaacaaactacatttttaactgtaactaatatgctagctagtctagttttacatttacccctgcatcagtgtgtaattaggatcagatagtgagtcaaagcaagaaacggatgcagacataagcatgacttcatgatgatgatgatcagatcagtgtgcatatccatgtgtgtacttgcagcatgcaatgatgatgcactagcatatactctctggtcgatctctgcacaaatacacgagcctagcttgtgacacaaaacacacactgcaacagtgcatatatcacgcacacaaaagttcagagatatcagtgtatgtagctcatgcaatataatgcaacagtattactcatcagagcacagtgcagctatatatacatgggcatggtataaaatcatgaacactacatgcaattgcgaggaaggtgtatgtagctatagcaactctctgcatgcccctcacaaggcaccatggaaagcaacatgtgtgtggacttgtaaccaccctctgacagtgtgggcccacccggtttcctcctccttgccgatcttggcagctaggtttgttaggttggccatggccatgaggagctctccagggacagggtacacttgctgcttatggcaacagagccaagaaaaccctagctcccttgtttgttgctagctagctaagagagagagagagagagagagagagagagagaggtatatgtgcagctagcatattgatcactatggttgcttgcttgccttgatgggggactgccactgcacattgtaccacatggggtggagggggggtggactgcacccctcatttgggaaggaagaaataaatttggcagagattttgatctctctccatgatggcttggctaattatatagtagagagctagggttccctatgtgatcaagttccgcgagattccgtgtttctcctttacagtaagtttagttttacggttttgctagctagccgtcgacagttttggaggctgaaaacttttgattttctggccgtgcgatccacgccatgattcgtgcgagatttggaaaaaaaaatctgcgcgagaattaaggtgtgtccttgcaagggcttgaacctaggatatccatcccacaagccgtgcgtgctagccacttagatctgttgcatgtttttaaaaaattaattgagttacatgttagttatactccagttgcaccctactataactgcattgtgtaattgcattgtaactacgttatcatctctatataatttagatataaagttacatatattattttaatacttatatacgagttacattatagttatagtaaaattatattacaattatactatagttagatttgaaagttttttccttaaaaaacttgcaacagttttctagttagtccctagttttattacgcacatgcaagtgggttttttaatatgaattcagtgagatcggggatatgttattggttttcatctctttgaacgtgtattaggaggcacattcgctggtgtgtgtgagcgtcatggtgcatgtgcgtctatcgtgtaaccaggaaaaaaataattttaattttattaagtattcttaagaactaatgatatctaagttattatgcattttatttgctttcagtcagtcagagggtcattggctgttaattgttggttgaccttctgtttgtccaaatcaatacataatttttgggtggacaatttagtatagaagtccatacgataggggcaaaaatcaataaagaagatcattcagtaacttattatatatcctgaggaatattcagtctagctagctacctcgatctgaatttgacgaatcagtaatgctaaagtaacaacgcattcatgatcatgttgaaatgttaatggagagctggtggcatatattcggagcatatatacatatatatgcatatagcagcccttttttttggtgaggacatgtagcaaatatataatgaccatatataagcacacaatataaacaaatatgtactgtagacaagaatacaaaaaaaaacttaggctcagaactgtgtaagcatgctagttagcttttagaaaatcttacattaaccaaaagtaaatgggcattcttacccacatatatatgatcagcattttcaggctacttgttgcatgaacatccaaacaatcttaatttgcacatatatttgtacatatatttttcatctcatccactgtctgcaactgttgcatatgtagaaagcgaggacttccatttatgaaacactgattgtgaaaggaaacggcctctttgcatcaagttctgtggctttcctttgtcgatgaagcttggtttcagtcccagattctttctcatatccaccaaatgtgcaaattcagagagatcacacgctttacatcgtctgattgatcgactgccggttcagattgagacatacacaaattacacgaaattctatatcactgtatatttccaaagtaatccatccaaatatgcatggttgatttctcatccaaactgtctgcacatatacaaacgcgtgcaattgagttgatccactgcagcaaattcaggtaactcaggagatcagtaaaagattggaagaattaattatcacttgccaacactaatgaaattctgatcaacttgatgggctaacttttgttcagagttggcagaaatctgaacatcattaattagatgacatttgccacgtagttgtgtgaaatcagatggcaacagaaatggaaaaaggttatgttgaggaagcttagcaagaaatcttttgccatagatgttcctgatgagttgtaaccaccaccactttacagcaatgacaattattgatgtgccaactgccaaagtattcaagaaagatcagcttgtagtatatattgttttcaggggtgatttaatttatgtgatgagaaagtaattaaacaaattacttacaatacttgatagtaatcataaatggagtccgaatagtggatccaccaaactcaaaataattaatcagctttagtcagctaggaaacagattcaactatataagtacatactttggacccctcttctgaagctgtaacctgttgattatcatgaaggcaagatgtgaattcatatacacatggtctgtgcgtatgaattcacatcttgtctttgtctgactgatagctacagcctgatacttgcagcagtacatgattacacattacatctactaccattgaggaaagggagagaatatgagtgactcatctttcctaactcacacaaaacaaggactcaaggatgacacacaaactagtagtactattcatttggtattctgttgtgtgcttgtgccttgtgacatatgcatttaataatacccaactctaccattaaaggaaaaagaaaatgttgttttccagtatgatacatggacttatgtaacttgtgcaaggaaacccacctcatctcagtcgatttttccatccatccgatagatcaagatccaatggtccaggtcaatcaaaccattcaatacaaataccaatttctaacacccacctctcttctactccccagctgccgctgccatgcatccacaccttctgcttcaacaggtgactcctccaacgatgctagacgccgatgagccctccgccgaccaccgctcaccattgattctacctaagctttgcgaggtgcccccgccccatccacgtcctcgtcctccgactctaccatccgccaccacctaaccagttggacgagattcgtccaccttgttctcctttttcttagttggatcctgccacgggatctaccataaccgtccaccgctacctaaccactcgaccgagatccccctaacctataccctcccccttcgtcttcaatggctcccatcattagatacgccaccactactacccccccccccctctttgtacccacggctccgattgcaccaccgccgcctcgtcgccttctcaccaccacccaccattgggccacacctccccggccttcctctaagccggggaactcccttctcttcctcatcctactgtgacctccaactgtgaattatattctaactggttggggttgttgtagccagttaacagagttcatcaaggtcattgaagatggaggagaagctcaccgaagcacggtaacaaagtagatccgaaagccagaaatctgtaagatttggaattctattttctattgaatgtaggttagcagttctgtagacaacattttcaagcacgaatgatatggcaactggtctatatatacatagtaaattaatgaagtgtgaaaacttgttttgtgcttaagaacagaatctaaatttgacctgaagaagataaacttttatgaacagctaacgcggtgatgaatttgagagtagggaaacgagctagctagagaatgaaacttcatacaggatacgttgtggacatggatcgattaggatatatccatcacaaagaaagcaaccatctgctcttccatgcttcagcagcagcagtcctgaattcctgatgctttgcacatcgatcagcctcagctttggcccttggggactgccaaatcgagtgcaagatttttgtaaagcaggaggtatgatggccaatgaaagctattacccacgatcccaaacatcaagcgaacataataagattacgctttggttgtatgcatcgatcctagttatgcagaggccacgattgttctcaccgcagttatatcaccttgatataatcgattagttcaataaaaactttcatcatctaaaactaattaataagagtacgcacacatgatcctaataattttgaagttgcttaaaaaaatagcggtctaatattatctagttctggtcaaaactaacgagggttcgtgaatgggggagtaattcatttgtcgttacaaactcaatataagaaaatagggatggtacatactagctggtattcccttgttattttattgtgtactgatatcttgtagtctgaccatttagtactaatatgggacacatactggattgaaggaaagaaattgttttccactatatttgccccctcttaaccagtaaataggattggacgaggctcggacaaacaaagcgcatttgcactaaccttatcccctcctcgtgccaaccttatccccttcccatatgatgtacggaagctcctcgtacccaaaggtgtccatggtgaggtcgaagtccaccaccgcaccgcacatgaactcccacagtagcactgcctcggtcacctgtagcggcggctccacctaggacaccctcttcgactggacgatggcctagacctcattgaggccatcatcagtttttccggtcacttggagcaagcaccgccgggaaggtaaccccctcaacgagccaccgttctgggatggtggcctcttggacaaagctcctcaccggcgtcatgtcccaaggctaggttcgattaaatccgctgtcaattaacccgccagcgccagacgtcgtcgcaccaccgcgggttcctgaccctaccccatgctcaatgtcaactacggcacaacgaggttcgagcgtggcatccccttctccttttttttgttttggctcacgagctaaataagctggctctggctcaagctagcacacaagccgagccaagtgtttagcgcgttagcatagcaagctgagccaatccaattcgttatcctaatgagcccggatgaactgagttgactcgatatccatccctacattgatatttgaaatgaatcaatgcctgcatataccagcaagcttaaatctggtccctattaatcaaccctatcatatctattattcctagtttaattgggtatgatttggctagctattgtacatatacaatcagttattaatggcattatttatttgtgcatatcttggtcacctatatatgtgtatatatagaaaatgttgattacaccataaagataggccttttattatttgcaatcataacttttttccaaattattaagaaatcgaatagtgtgtttcaaaaaagaaaaggggggccatagcagctataaaaagccatgccaacccaatcagatagccatcaccttcacagccaggattagcctagctaacagcacccctgccgcagcctcccttttgcaattcgccgtcaattcatacgtaaagcagctatagccatgcataggatggtgaagctactctgcacgctgctgctggccctttctctcacggcccactattcgggtaaatttctcgtcgtcccaaaataactccatttcttttctcttatccaagttcatatctagaaataaaatgaagtacttgtacgatcgatggaggtagtactgtttatatatcgatttatatgacgaagatcgtcttttctttttgattatatagaatacgcacatgtgaaaacttaataagttttgatttgatctgaatttgcagatatgtcgatgaaggtgtcggccgattgtcagagcgtcaacgtacccggcccctgttctcccacaacgtgcgatgataactgcaagtcgcaaataggtgctggggctgttggcgagtgtacgtccgggggatgccaatgcaccttttgtactctccctcctccaaagaagaactgaataattaattatgatgatgatgcatcatggtctgtgatgtatcatttaatcctagcataataaaattatacgaaattgtgtcgacgatatatgtggatgtcttttggttcgagcgacgtttaatttggtgcatctcttacttgaagattcttgtttcgtggaattagagttgtactaaatatttttgagatctcgaataatacagaaggatgttgccgctccgtttctgaaaattatggcccgtttggtatacagctcctacactccgagattcttgtttcgtggagctgaagctgtaccaactgtagctgtcatatccactatattaatcataatttaattcgctttattttcttcttctgctgagattttttattgattagattttgccatatttgcaagtaattaattttttattttttatttttttttgcgaggacaagtaattaattatttgagcgtatcttggttacctatgtatagaatatgctaattacaccataaagctaggccttgttatttgcattaattctatatcctttcgaaagaaaccgcatatatgtttttccagaaagaaaaacctagcgtcaactatgcaagagtatatatgtgtctataaaagtcacatctgtcgttcatcctcacagtaacagctatccctcgcggtctactgttggggtaaaattcactactcccatattataagtcgtttattttttttaagtcaaacttcttttagttgaatgaaatttattaaaaaaatcaaacgatttataatatgaaacagaaggggtttcatttttattgcacataagatacgtagtgtaaacttaaaataagcttcgatatgatctgaatgtagtagctaggtgtgtcgatggaggagttggccgatggagcaaccccaaaggacttacgcaaaaccatcaccatatatatccggtctgtgttttccgaagttaagtcgtgccttgtttacagcaacaagcaagttgatgcagcttctaccagcgggatgcctatatacctactgtctctaaactttaaagagaataaaatattttctttgtctcaatataagtaaaatctagtacaaatataacatatattaaaactatgaatctaaacaattttatagttctataatatattacatctgtattggattacacttatattaggacggagggagtagctacgttagataccatgcatgtacaatggatccactaattaattagttcttgctaccagcacattacccatgttcaagggctccacaaagaaaaattagaggaattttgaaggatttgattcgtatggaaaaaatattcatgtgtggttctttggaacaatagagaataactctcctaaaatttataggaatttcggagaaattcatggttttctcttccagtaacataaagtttgtgtcatccaaacagtaattttgaaattttatatgttttaagttcctataggaattcaattaatgggcatgacgctttactcatgcattttttatgtttctatgttctcacaatcctgtactctgaaaagtcctaatctacctaaaactgtggtaataaaaatgccccatttgggttggagcttcagacatatgataaggtgtgtagcaagaaatcttatgcttctgatacgtaacttgatggctatcatataaaacggagtcgaacttgtagatccaccaaactcaaaaccatccgcttgcttgcctgctagcagctaggcacaaattcaggcattcagctacaagtacctggactgtagataccaaatgaagtgcgttttgtgcttatggactgtactacaatctaaatttatcctgaagaagacgagcatttatgaacagtaaacccagaaatttgagagttcagtgaacaagctagagaatttgcccaaagtttatacaggatatgactatcgatgcaagggtacttgtcccacccactttcatccaaagtcaatacacaggcagttaactttcacacatacaaataggaataggattcaacagaaagaaaccaaccatctgttttttccatgcttcagcagcagcagtcctgatgctttgcacatcagcctctgctttgatgactgccaaatcagggaggcaagattcttgcaaagcaggaggcatgatgactgataaatgaggcaacagactgatgcatgacatgaacaaacactcaattcatacaagggtctccacatgccagcacttttgagtattggattagaaactgatgaaaggtaaggtacagttactacattagttgcaaatcacctaccaaatcacaatcttttttttttctactgctgccatagcagagcagaactaacattaggaaagcctaagacctaatcagattacccgtttcagccaacaatcatgggaatagttttgacaagagcactgagttttagaggccctaagttcacaggacaatgtatatcaatgtcacaacttcactgtatcatctttagctactttctggcagagagtgctgctcttcaggggcctcttcctgttgctcttgaggctgctgccacacatacgtcaccgggtgaccttgctgtccaccgtacatcattcctgatccaggcccctgctgcgctggcacgtagtaatatggatatgtgtctgctgcgccccccacattaggcggtaggccaaccctcggaagcccaagcccttcttctttcatttcatccctgggaactatgtccaccaagaagtcatagatatcagtcctggtgatggcagctgcaatgtcattcttctgcaaggtccggcgcttgttctcctccgtgtgcatccacgacctcaatgttaactctaatatgaatacctcgcatgcctttgcgaagacaacgggggcttctgccgagatcatccggacatcctcatcagccttcattatcttctttatccttgcgagtggcaagctgtggttcttgaagtcggttgtttgctcaatctcttccatttggttagcccagaactcacggagttgctgctgttgctgttgctgcagctgctgatgaaattgctgggcttgttggtagactagctggtgctgagcactgagttgagctggattagtggggaatggtgctgatggctgtgagccaggaggaacaacagcaggagctccaggaaccatggcttgaggtggatatgcagcagcaggaggaggatatgcttgtgacccaccagtggcaacacccatcacaggctgaggctgtgaggatggttccatgtcagctcttgtccgtccaaagccaaaggccctgtcgttgtgggaaacagttgcaagtattgatcagttgatcttttgtatagattaacgagaaagatcatgataggttctaaatttgtattttgtcaaatacaatacacatgagtgagaataccttggtataagaatggaactcactgcttttcctttacaaaattgtatctgacatacaaacttgcatgcagggaaaaaaatgattgaaggaacaaaggcaacttgattgcgacttttgttgcttatagtacaattaatgagcaacttgagtgctgcggttccatgtagcttgctgttgcactttaagcacaactcatgatctcaatactttcatctctattggttcattaagcattctaaacagaaagagacttccattgaatgtggaatagaattacagatgcataactaccagtatatgtgatagaacatgtgcaagctaaacagaaagtagaaccttccattaaaatcatccctatgatttgtgatgggatggtaaattaccttttgtactcctactatccatattgtgcaagtgggtagttgcatgaacattcaagccctgccattatcggtcaaactggttacggacaagtgaatttgtgggctgctattacaaaccaacatggataagtatgcatcatacagagtttgaagcttctcatgcatgtacagcataaatcacatgtcttgatgttttccggtagaagcaggtcccaaagataacccacaaaaggtagctatgcccccatggctccagttatgacttattagtctcccagaatgatggcatttgtgtccagagggcacagatcggctagttccaagccaattgcacaggttttagctcattgactgacaaatcaatgtttggataactgagatgggagatgggaaaatacggaatgaattgtatttctagtcaaggctttttttctcccctctactgttggatatccaacactccaaggatggcctggatttggtgtagttacccagctgcagttgcagctgtcatggcagggcagttcataccatggctatgtgttcctcctaatttactcgcagcatctcatctacttacatcaaaccgaattaagtctatgacacccagatgccaaatctcataaatatttttttccatgtcaaccagaagtgtgtgtaaaagaagactacaacattcaagcaagtaggaaaaaaaatgcacacttaaatatgtaagaaatgttaaaaatgatccgctatgtcattattaactttgaacaacatatcaagaagccaagtgatccaaattgccatcttactctctgtttgacacaccatcagtactaaaataaagtgctgtcaggttaagcttaaggttggggtgcaactaccttaattggattctttgaagaatatgtcaatcttgtagttccaggaggtccacacatttgggacaaacaaggaaagttggcacgtatcatgtcacgtgacatttgaacacagaaaaaggcaaatttagatacattccaaaactcagactcattaaatgcatgggaccaatcacgtctttttttagggaaaaaaaaagagaagagagcagcgtcctaacacatacgcgatgtgggtgatcatgtaattatgatccatcactaagagaaaatatcactccaagagaaaatcatcatatcacttcatgaaaaaacaatgcaacgaatggtaggaaattaggagtgccctgttttgacagaacatctagacagcaaatcatgagatcctaacagtatgaaaacaacaccaaaataaacaaatttagatgtggcatcagaacagtactcttgcatctaggaagtttgcactcgtggcagaactacgttaagcgcgcgtcagcaatccatcatcactgaccatggtaatggtttcctacgagttgacccactgttcttacaagaagatgcaggtgcggacctaacacggggcaaggccagggtggtcatccatccacaccgtgcttcttgctagtcacgcaggcgaggaactccagctcgcactgcagatcggaaacagaggagagtacgatcgcgatggtgaaggagggcatcttggttatctcacttctttgaagctccatttcactagttagtaagctccattcccaaatcaaagagaacatcaaacctaattctcctctacagcagctccttccaaggctccggcgcggcgccaccacaccagcaactacaaaccctccgcctctccggcgagctcatgaactccggcaaacaagctagggttagaattctgggcagtggcaaggcggccatgacacgggaccaactcaacactcatgaacacaaatttaccaagacgagaccgcacgtctctccacacatatagcaaactaaaaatccaaactagaactaagcaggatcaagcaatcgaaacgaagccgacgactaatcgaaacctaaccatatgctgccaggatcagctccacagccctagaaacagaggcgatgattcctccctcagctacgagccgagagagaattcccccccccccaagctagcaacacccaacccacgcatgcagccaacaatccaaacgggatcacccacggaattgggaacagagagatcgaggaaaggtggcgggaggcggggcttaccgagagacgacgcccggatctcccgcgccggcgggagcgggagcggcggcggcggagagcgctccctccggcgaagggccgcgccgcccacctccctctcgtggagccctcggcgtcggcggcggagagagagagagagagggagacgcggtcgcccttgggtcagaaggacgcgaggaggaggaggagaagagtcagcgcgaggaagacgaggagagaggcagcggcggccgcgggcgggggtggtgggctcggtgggccggaggtttctctatgtgggctccaggcctggtaaaattccgcgttgtttctgttggagaaaaaagtctaatttgcctcccttcgttatagcccatttcgcaccgtaaaaatttctaacgcgcaaccaactctaaactcacctcacgctctacacaatcacatccattcacaaagcctctgatgggttatcttatcagccgtagctcaattttgaaatttctaatttgattctacattttttttatcttagcctatttttaatattagattttaaatcaagaataacacaaatataaattttatatctgtaatttattttgttggctttgttcatttttctatgccttatcagctataagtcaaaacgatcaaaacaaaacaaaagctggagacttcgcaaaggatataatgaatctcgatgctaatgtgaataaataggatatggatttttttaaaaaaaaaacattatggacacaagtgctcatgtacaattgcgcgcagagagattactgtatttctagtattataaaaaattaaaaagtactgatatacgtacaatccgattatacaactcatatatagctagaaacttgcaaccatagttcaatctttaacacatttccccgcaaaaaaaacacacacacacattcatatgcactacaatcagcatgcatgcacgggcatctcatctgagaagattgggaagatacgcaaaacgaggtaagtcattagcgcatgattaattgagtataaactattttaaaactcaaaaatggattaatatgatttttttaaacagatttcctatagaatttttttttaaaaaaaaacaccgcttagtagtttgggaagcgtgcgctcaatgtatctggaacgaacgcagccttcctcctctacccccgtaatttttgcagtggtggacagaaccagcagttacaattgtttgattttgagtggctaaggccttgtttagttcgtgaaaagaaaatttttaggtgtcacatcatatgtttgaccggatatcggaaggggttttcggacacgaataaaaaaattaaattcataactcgcctagaaaccgcgagacgaatcttttgaacctagttaaaccgtcattagcatatgtgggttactgtagtacttatggctaatcattgactaattatcctcaaaagatccgtctcgtgatttccatacaaaatgtgtaattagtttttgtttttatctatatatgactttttgagaaaaaaaattaggaactaaaccaagcctaaatatgtgaaccctatagcctgtgagttgtgagcctatcagggtttcccaaaacgccggggccagagttaccgcgctccggcggtaagcacggttaccgtgcggttaccgcggtaaccgtggaaaaccataaaaaaccgtgcaaaatttatcaaaaattcaaattattttttaaatttatttaaatttaaggaggttaccgcggtatttatattaccataccccgcggtaaacccgataactacggtaaccaccggtaacaagggaaaccctagagcctatacgttactaacccacgtaaaaaaaaaagatagtacgtccgatgagcttcttccgtggtgacccactgaacctggtgcgtcaaccgctagctagctgagctctcactcaactggagagaaaatggtgatttcagggtgaagcaataattgaaattaaatttgaaaatatactttttattttttttcttagaaataccctatatgcaaattttgacacaaatatactgatggtttctctgaaccgttgtgcgaaagtgacgatgtgaacggtctcgcgcaacaagtctgcgagagtatttcaaaaattaaatgattaattaattataatcagttattaattatcttaattagtctcgcacggtctcactcattctccacgtgacaccataatatcgacatcataatatcaatggtatatttgtgccaataaaattacatctagtatatttctgagaaataaaaaataaatggtatatttttttaaatttaattcacaataattgtgttgctccactattcccttcgtccgaaaatattaaaactagaatcgaataggatattttctaatatgatgtatctagatatatgacatgtttgattggagggagtttttataatggattggaagtttaaagtgatgaggttattaactgttttgtttggttgggatacatagtaattttggtgggatggccggatgtggatggggaattgaggaaggaactacctcattttcaatacctgggtaggggtggtaattgggagataattccttatttattttgcctaaataaatcttaaccatctgtttttattaatgacccgatctctaaccaaacttcttatcgactttcaccacctctaccaaataagatattgggattaaaaattaaattttcatcttaatctcatcatcaatggatcatgtaaactcctaattctcttccctcgtgttgccaaacaagtcgatagagtttggtttcagaaacgttgtaataaacgtcacattcattcaatcctatgtgagcatacatctttgtccaccaaagctaggtaggcagttagcccatcacttatcgtgtctagtattcccttcgcatccatccacgattcatctatcgtcaccatccagctgatccagcgaacgcacgtatatattccccttctccatgccatacgcaatcttgatcaacatgttgatcaactaatcacttcaattacactctcagatagctgcttgggttccccaagatcggtgcacgatcgcaattaattaatcttaatcacatctgtacagtacacatccatccgacaaatgaacggatcttcgcttgcaggagatagatagatcgatcgatgtcgtgctattatttctcttccaatattcacaatttcatccttcccttcgatctcatctcatttgcagccatggctgggagatgcatggcgatcgagaagaaacaaaagaagaagctcaaaatcatcaagaaaaagcgaaaagaaaaatctaatgggtggccgtggctggagcagtgcggccggcggcgaggctgctcgggtgggcgcgagcggcggcggcggcggcggcggggaggacgaagcgggaggagaaggtgtagctgtagtagagctgcgcggcgtcggagtcgtcgtccagcccgccggcgacgtcgacgccgccgcggtcgaagttgcgcgcgtagctgagcgggtcgtactggcaccggccaccgcggagccggctcgacgccggcgccggacgcgccgcgcacagcgccgcctgacgccggaggcgccgcaccagcctgcccagaccgcagccgcaccgccgcgccaccaccgccgccgccgccaccgacgacggcggctggccgccgacgccacctcgcccatccgccattgccggcttgccgctgagcggtggcagagtggagtagtgagagagtgagagtgtgtgctggctggctttcttggtaggtgaggtgaggtgaggtgagatgtgtttatttataggtccaaggttaagtcaaataaaatgtgtgtctgtgagactgtgaccatattaaaaccatacaaaattacaaatcatgatttcaaagatgtccaaagatactggtgtcctagtactccactagtttgaacaagtgccaaatttggttctatttgtaagggctgtttagttcgcgaaaagaaaattttagggtgccacattggacgtttgaccgaatgttaaaaggggtttttggacacgaataaaaaaactaatttcataactcacctggaaaccgcgagacgaattttttgaccctaattaatccgtcattagcgcatgtggattactgtaacacttatggctaatcatggactaattagactcaaaagattcgtctcgcgatttccgtcctaactgtgtaattagctttttaaaaaaattctatatttaatgtttcatatatgtgtctaaagattcgatgtgatgtttttggaaaaaactttttgggaactaaacaggccctaaattgaaacaaattcagcacacaaactatgtgggtttatgcctggactggggcactaggtagcagtaactcggagtaatggtaagcaggtcatcgtccgtagtacgttgctaaacgctggaaactccatgcagattggtttcttggttccagaaaagtcgaaaacggtgggcagcgtgtggtccaacagcaataccatggattagtgccgctcatgcttcggagaaaaatgagtaactgacacgtggacccatgatggatggtgagcctcagcagtcaggaccttctccttccgttttttttttttaaaaaaaactctaacgataagatacatgacgttgagtttcactagttaggaatttactgtgtccacgcacaagcggcgcatgcagccacggcggacgccacagtcgtcatgggccgctgcttgtcgcgccgcgccaccgatgcgatgagatccccccatcacgcaccgccgtggcagcctcaccgtgcccacccacgcatctgatcccatctcgcaaaccgtttttgtttttttgtttttccccttttttgagagagaaataaaactgcgtaaagtttttcaagaaatttccaggcagacaacggtttcatcctctgctactgcgacgtcacctttgaaagaacaaattcttctccaacaaaaatcgacccaaatttgcagcagtggccatgcatacacatccacgggaggacagacagtgtgcatgtgaatatgctgtgatctaatgggcaggcaatgggaggacccacgttgcacacattcttccctaaccaagatgccctgtctctctggattatagtagtactaatcacactcccctgaattctgcgaatggattggactgatgagctgagcttgttgatgagaagacattgcttaaagcgaacggctccatgattcctaaccagtgtagttgtagtactagaaaagttggaaaaagttcatgcactttagggtttaatccatccatcctggaaggcaactgccgacaaggttgccctggagcccatcatctccagtagtacgccgatgagcaatcgatctgatgatccccatttgctttggatcctcagcagctggtggttcatgctacagttctgcttgcttgtcaagatcgagctcacatgctcgcactgtttggtttggtgattgtcactgatttgaactggtacaaagttaatggttaacttaactcaggcagtgagatgagatacaactggggaaagtgtctactagttgcaggtattctaaataagaatcacatgagatcagcaagtttggaagaaatttttttttatggtaaactggcaggaataatcatcagatggagtcaaacatcgcaatttggcatgggatcaacagatttgtcggctacgattcaagctgccaccatttcttgctgcgtgatatataaatgactgtgaattcagtactgggggctctgcaatcctaacacgataacatggcactgttcagaactgcaacgtaacagtgatttttgggtcctgtttcaaaatctaagctgaaatcgcctatagctgacaaatctactccaaaaacatgtattggaccatgcctttctttagtaccaaattccagggctcatcataggaatgatataaaaaataaaaaaggggaccctaatttcatttgagatgtataatgagccataagcaatatgcctgaaaattttacattctctagtctgtaatgaagaactaacaatcctccatgaaacatttttcctaaaacagtagtcttatgtaattgaacctttttcctttttaattttgtttgagtcaattccttttgggtatctatatatcaaaagtgatttttataacataccggtatgcagaaaaaaaaaggccgttaatatatttagtacagaaaagcaaaatatatggacagaagaagaggagggcatagctctgtgagcacccagtggggatcaaccacagttgaaaactggaacacgagcagggtatcaaatgaccaaatatgtacaaatggaatccaagcaagcccgttgctagttagcgttgaatcctttgagtgggagcctgaaattttgcagaacagacgccattaatagttcactaatcatggatatacctccgccgtttcacaatgtaagactttctagcattgcccatatccatatagatgttaaggaatctagatatatatgtgtctctaaattcattaacacatatatgaatatggacaatgctagaaagtcttacattgtgaaacggagggagtagcatttttcttttgatattaatttatatagagtactgatgatacttttcaaatttaatgtgcagaaacaagagttagataaatacaaacaaacgagaaaccaccactgaatgttggtatagaacttatgagtaatgactgcaactggtgcccccagctcaactattccaagttgactcaaattaaagaaggcttagcttactacttgcgatcagaattatctggaaattaaaggtgcttttcttttgagaacccacaggaaatctgtgtgactgcgccatagtacttggaagaagagaaaaactgtggcagacaaacccagaccagcaaagaagaaaaaaattggggcatccaaaacaaaatcacatctacccttatgcttaactgcaagtgattaccttaaaatatataatactagatggactgccatatcatctcatatcaataaatgcatttttgcaataatacaatccaactgcattctctgacataaaatgaggagagtttatgcatcaatgtcaaaactcacatccaagtgactattaaagattccaaggtactccctccatcccaaaatataaggaattttgggtggatgggatgtattctagtactatgaatctgaacatacttcatatccagatttgtagtactaggatacgtcacatccaaccaaaatcccttatatttagggacacagagagtatggaataggtcaatctgtcggctagaattgcctatctgatgtgctactgctcaagtagtaacttatcccttatctataagaataaaaatcagcatgcactagtctgcacaaactgttaaaataaatattatgccaactagggagggactagctagacacactacacaaaaccatacattgtgggatgaagggtctcgtaagacaaccatatcagtaaaataacattttcatactatgcagtccttgctatgctcagacgtatttgaattgaatgagataatacaatgagaaacatgcacatcttgtaaatttgaggtagcaaaataggatgaaaattgtacttaggatcaaataaataccttcaccaaacaaagacataagggcacatcaggacaacttttacaaaatacaacagcttgcttgttccctgaaaaggtacaatcactcagttattttagtatagctatttcataagacatatagttacaaaaattagagtagttttaaagctaaactttaaaaacatgtcaaaattgcatttttgagtaagtttgaatatttgatgtcaatgctactaaaaatgttgatgagagctactcacacacttatgctctcattttttgattggtcagtaaggcccaccttataaacaaaaataccattttaagttaacagcaaggagaagcatacttctttggatcttggtatagtcttaaggcctccaggaatttgttccaaaatgggccagtctcctgaaggctaacgttttctggtcccccaaggtatgcctgaacaatgaactcgtgacttctttctctgaaagagagaagatagaatgtgtcagttttttttttcatttcgctagtacatttattcactatgctgaaaacatgttagcatttaatctcactaaccttccttcatattgtgacaaccatcccaagtaagctgcgccaaagtacattgatgtaaaaggattgtatagatcatctacggagctgacagtatacgccctatggccacaatctctgcaggaaaaagctaactgcaagtgaagataacttcatgaaaactataatattataaccgaccgagagtaactgcagtgtgtcttctgatagcctaagcagctaacttctcctatgcctatttgttttccagattaatcttctctagaatatgattgcctgacatctgaagtaacataaactagacaagtagtagaccaaaataaattatcatagtttaaatcaccatatgaatatgtatgaaggtatagtccaaacaatagttcagccatcctgaacagtgcattactctgtaagcattcataactagtaaaagggcaaaaggaactggtaaggtcctactaggattaagcaaatagctcaccaaaactgttagacaaaaagcaaagctttatagataattaaaacacaactgtaaacttaatttcatgcttgcctgtaaagccatgctgcagtagggtagtctattcccatcaagccagtacgagaacgaacaccatggacaaaacgcatactgcacacctcagcaagagcagctagggcttcctggcagatatgaatgagaatagagaatttactaaatatctcaagctttcttggaatgctaaaataagagtaaatactgttattgtaacatgcacccaaataggccaacaccatctttattcaccattttgaccaggacatatatactaacacaatctatggacatttgcataattttagaatatccacaaaatagagaaaatgctttgttgacaaaatatacaacaaatccattaactaatgcaatgatgttacatgaatcgacaaccaaaataagatgagttttatgtaaaaaaagaacaagatgagtatcagcactgatgtgatggataatcatgctaaagtactaaatgtatgacttagaaaagcaataccatgcaacaaagcaaataggttaagagccaaaagaatttcttcagtttgcctaaatgttggcctcatcacatatttaaaataagggagggccatgttataggtgatacagaaagcgatataaaacaacaaatttaatacataattagtatcattatacagatactatatgttcactgatttataaacaaaaaaacttactggtgttactccttttgagctcaaatgacgtgatatggttatttcagcaacagcctgagaaaaaaatttacaaccacgtaagtctgagatggatggaaattaagtattggtgaataaaataacaaatacatgaaacctgcaagacattttactggtgagcagatataggattattgtatcaaacaaggcatgagtctgggattgttccaaaaagaaggaatagctatggcaccaagtataagtaatgcttctgtgaacaatatttgtccatgtaatttgtatggcatgataggaaatgtatagcactgcagccacacctacaaactacaaagttgattttattacatgccatccacacgagcagttcacttgatcaaatcaaggatgcaattttaacagcacaagaatattaataagattatagtggtagctttacacaaaaacatatgtatgtcaacattttagcatggtaaaaaaaggtggcccgtatactgcaaatgcaaagtaactacaaaaaatttaaagaatcatcttttaccttcacctcaactcgagaaagataaggcctcctcttggagtcatgagaaaacctcacatttcctcgcctctcaccagattttgtccactccttaatcacatcgggctgactccacatcgcatccatatctacctctgataccttggaatcccaataaatcaactgtccttctgactcaaatgtgataacaagatgtcagcttgaatgttagaagcatatcaattctctggaatcaaaacaagaatcaacatcctaaaatcataacctagtatttgctaacatctcgacaaaccacaaaccttgaatagcagaaaattatttaaataaataaaaaggtaacacagtaaaatttaacctgtgctcgaggaattggctaggagattaggagttaaatcattaaaactttctggctgtctgcagacaaaatagcaagaagcagtttgtcagcaagttcagaactggaactaaagtaaaataaaataatagctcctctacaaacataacttttggatttcgatccattgaatatgtttctaaccctaacggaaaactcagaagagcttgaaattctgaatatatttgagaggccgagcaaatgatgcaaccatcaagaaacactcatgtttgaattaagaaatatcagtgttttaattaacttggtatttcgacaggtcaggtgagcatgaattacagtaaagaaagtcactaaacatattgctgtccatcatgtgtttaacctgccagcatagaaggtccacatagcacagctcaggggtcaggttcaggggttcaaacttgagatgaaaactactgttctttaaattatgtgacatgtcataagtaaaattttaggttttttacctcaaatcttcaatggccagttgttttgagaagttcaaaccaattttctccaacttaaaggtttgctaggcttccaaataacctcaatacctctaaaattggaccttggaggttcacaggtgctaagagaaacgaatttgtttagtgcttaaggcacacttttcacagaataagaaagttagaagctgaatatggaaataaattattaagggtgaaacctcatagacagcaaggcctccttcacataaagatagcgttgaaagatgggggaagttgatttgtgaacagccttctttttgcctcccttgtaagctctaacaacgaattcttcagttctttctctgaagtgtttttggcaagtaattatgtttggcagtagaagataaaatatgtcaaaggaaattaattgcaatggtcaagcataatctgacaatcaaaatacatacttatcgtcacatgagaatagccattttgcataagcagcaccaaagtagacattcacaaaaggccaatagagcaaattagcatcttcttcaatgtcataatacttgtaacccaattcccttgttaaaggtaaagaaaacaaatatttagtatgaaaacatagaagaaaagatagttactaaatctgggttatcaaggtttcatggtacctgccaagccattgagcaacttctattgtcacctgcattatgccagctttgatctccttagtctttcggtcataattatcgacaaagagtctccttccacttgcaatttctgcaagggcacctatcatatactgcatgagtgatgaaagtaaaaaataatgtttaatgtacttcagcagtgtctttgatacatatacaaatccaaatattgataagtcataaagcaaaagaagcaataccgggtctagctgtgacttgaaatgcttatgaacagtaattgcagccaccgcctgaagaatcaatgaatttagttttaagccaaaattgtacagataagtagataacaagtacagttttgaaaaagaaaataaagcaaaggacccttaatttgttattgtttccatagcttcgaaaatttgtttagatcagcgcagcagtaacaaagttgtcaacagtaatttagtcacttggataaatataggtaaaaactattatgttagactcttaactcacagcactgattgatttttgtcttgtttaaacttcggtgaatcaatttgctggcactagtataacctgcatttaacgccactacagcataggtacaaggaaattattgttcaaaagtaacaaccaagtataatataaactgctcaaaaaatagacacgatacgtacagaaatacagcttgcgaaaaaataaatacaatgatttacatgaactttggttttttttctttttagataatgacatgaactttggtttgattgccactaatgcaggttttagatgtcaagatacactggctacagctgatcactcaccatcatttcagtttgtgtgagatatgcctcaccatcaggatcccgtgacaggtgaaccttctgtcccggcccttccccagcatcaatccactctttacttacatgaggatcagcccacattaattgcatatcctctggatccaagcagtcatcccaatatttgaagcttatagccattttgtactaattagcaattgtatctgtcgatctacactgggagcaacaaatatgaaaattatatgcaataggataacttccttaaagcaaaaggaaatccaatgtgccaatctgcattttgttcagggttgacatagagggtgatggaattttgaacagttagaagccatcaaataattaggaatgggaacgttgccaaaacaaaaacaaaaaaagaaaagaagtgagcaaacaataagaatatgttctgattgcatcgtaatagatgcgaaaagcatccgcgcttctacaaccaactatgcattcaatttgagctcatagcaacaacatggagtaatcactgaaaagtgacagaaataattgcttcaatcacagttacaggataagtcaccccagaactgcatgctgaactcatcacccaaaaaagaagcaaacagggttcatgatcaaaccacaacacaaccaaaccaatcatcagagacgcatgaagcacatataaccggggcaattcaccccagaaacaaatcagcagaatcaactccagaggcactgtatacacaaccctctgaaatttctcaaccatgttacaccgaactattcatattacgaccgaattgacaaaaactacttccactccacaggcgcatgacaccttataaatcatgatcactgccttccaccgcaacgcacctcaaaatcacatgtatgcacaatcccacgacactaacaagtaccggaatcatgaaatcgaccatgggattggaggcagtaaacaaccgcatgcctgcatgatgaagcaacgcatacacaacccaaaaaaaaaaacgcagaatccgatagccacacaaattgaatggtcaccccaacccagcagcagcagcatcgccgcgtcacggaaccagatgcccacacaccaaaacaccatagcgtcatgcgcacgcctccgcgtccagcgagaccacccgcaacaaacaaacagcagccgcaaccgcattcgccgaaccaccacgagactagacgcgacgacgaacgccgtcgatcccatccatgaactccatgctccccatccaaaaaaaacaccaaaaatcatcgcctcgctcgctcgctcgctcgcgcgctggatcaccaaataaagcgcaaaaaaaatgaaaaaaaaaactgaggcgggatcggaacgggagctcaccggcgcgcgggattgggagacgattcggaggattggattcctctcgcgtcgacgggggatttggttttgggagggaatggcgggttggtgcgtgcgttggtggaatggggaattgaggagagagagagagggaagggaaggaggggagagagagagagagagagagagagagagaggcgcgtattgccgtttggtatacaacgagggtaggggtggcaggcgcgacagtttaaatgtcggggagcggggacacgtgtcaggtggttagggcgcaatgcagctggaatttttttcgcgagcaaattgcatactttggcttttttttttttttgcaaaatttgctgtaggacatctaaaaaacgctaatttgctataggacaccacaaaaaattggtaattagctgctggacacctgcagaattattttattatatccggagaaattggatagagaaacaatcattaaagacaagtttgcccttggctcaaatgagtccaaacgtgggccccacatgtaagctcaaatgtaagccccccctctctctccccacgcagcgccacgtcgaccagctggaacacgccattgcatacccacacgaggacggtgagacgccacattctccttcgaggcgtcccggtgacactcatcgtgctactgctaccgccgcagccgacctgcctccaccgcatctctctcgtcaacagtcggttccgccgcgtgctcactagccgccggttcctccaccatttcagcgacctccacatcagcgcgccaggggctcccctcgtcgggttcttccacaaccacaaccatggcgcctgggcgaacaaccgctccatccctatcggcatcaatgacaccggggactgccgtcggagccaccatcgcggcgccacgacgcgtaatcctgacggggtgttcgccttgggcgacgccgccgagtggcacgtcgtcggctcccgtggcgggcgcgtcctcctccttagccccacccagctccgcctcctcgtgctagagcccatgcttggtcgccgccagtacatcccggtgccaccggcgcccaagtacaggccgtcatacttcagcaacgcgcaacaccgttccaaccgaggtgcccgcactggcccgcgcctcgtcgcacgatcaccagcgctccctcgggctcgcttgaagagcagagagagaaagagagaaagaatgagatagagaagaataaggaagaaggagcagagaaggatagagaaaaaataaaaagaaaaaaattcgaagggtagaatcgtacttacacagttgtttctctctgcaatttctccggatataataaaataatctcgtgggtgtccagcagctaattaccagtttttggtggtgtcctatagcaaataagcgtttttgcagtgtctcccagctaattacacgtttttttgatgtcccatagcaaattttacaattttttttactattgttataacttaaactatgtatgtaaatggaccatgtatgtttaccaaaattctgccctacaggctacacctgttcttctacctccagttttttctcttctctagttctcttatgtttctatggagggtgaaagaaccaccgatgacagattggtagctaatcgagcatccaccggccaccattgccatgcgcttgagatgaaacttgaatctccccagcctatgttttcacttgagctaaaaaaataaaagaaacaaacaaaaaaaaccaattgctaggatagagggggacatgtggagctcgagctcaagcgatgcgtcaatgttggcaaaggttgagatggagcatggcgctgatcagtcgaactagagctcaagtgcaacatgaaagctagtaggactcaaggtggagcacatcaccgatggaggcaaaagatcaactgcggtgatggtgcctacggagctcaaggtggagtgcatcaactaagatgcttgtgctcaaggttgagcacggggcagaggtctaggttgagcgtggcaagcacactatctactagactctagctaaagacaacatcgacacttgtggcaaggttgaggtttcccgcacgcactacactagctagcctcagaactcgaggtcatcattgacggtgccactgatgatatgaagaggatagagcagagggagggagccgttggtcaaaggaaagaggagggggatccagattccaggacagagccatataaggcaagagtctcacgtatggttctcttgagaagagcgtaataccaccaccgatgagagaggggagggagggagctggagaaaaaaacaagtccaaattgaaacaatttgtcaaaataggtggtccaaactagaaaggtttggttacccttgatccaacacgtaagtgtggtaaaaaaattcatatcaatccaataggcaatttactgttatttctcatacatatgagcatgcatatccacaattaatccttctattcacatgtttaaaagaagacgaccaatgataaatatgtgatttttttactgtatttatattttgtataggaagatcatacatatgttcaaaagaaaatcataatgttgtgaccttactaaattactattttatatttaatacatgggtggtagggtttgataatggataccagttccgctctcatgtggctttgtttattgccatttcagatacgtaatttcgaaactctgcaatttcacagcattattgtaatatatctaatacaaaatatactagctcctatgagataagaattttgataaacttcatggattctttgcaaggtacaaacaattttgtttcatttcagtccaactttatctgtgcgtttttcacattggaattcttctccccatgtttcaaaatagaagagctgtgctattgtcttctgacctagcaccacatatgcaaaatatgaaaccatgcaaggatgcattcactattcgatgataaacaactcaggttgtgatattacttacactgtactatgaagatagcatttgtatggcgtggtacgttaaaaaatcggagggagtaaaattgttttctctcgtggcagagtaaatttgaattttgcaccgctcaaacatcaaaagcatggtcctgttcggaccagaatggtacggctctgatgctctggcacaaatcatgttcttctcgtgtaatccctccgtcctggggatttttgatattttacttttactgtttgactacccatcttattaaaaaaaattatgcaaatataaaaaccaaaaaagttaggctcaaagtactttggataataaagtaaataaaaaaataaataataattccaaaatttttattatcaaccaacaaatcagccagccaaaaggcagcttgtcattacaacttgatcgattacttataaataagctgtatcatactattatgtgatgaaaaaaaatgattaattaaggatcctttcgttcaaatggatccacaggggtttattcgccagaaaaacatcgaggtgagattaattcaaaaggtggttcacggcaaaaaactgtgaaacatgtaaaacttcaccaaaaaaaaaaagattctccataatgagttgataagatcttacattgcttgtccttttcaattagacatgttgacatggcagtaggaaaaaaaacatttacatttattttgaacagtgtatggtttgtcattcatttgggaagcacccgtttggccagttcttttcttttcctctccttttcatttcggtccttttctgctttggttggttcgcctcttatatccttttttttctttaattaatttcttaaagattataaaagctcaaatctatggtagaaaacagaatgcccgaactttaaacaaacaccaaatacactcattcgtcaacgatgtaatggccatcatagacgaattagcatttagcaaccagactattgacaatcccttcttctccttctccaccttcccattagccaacaaaaaattttaaacaaagtgaatgaaaacgagaatctttcttccatttctcaatttaaaaacaaaaacaataatttaatgacaggagaggtgaggttgggggtccacaaccccagagagtcgggagggcgagagatccgattcggtgcggggtaggcgacccacctacccattctagtaccctctctccctcccattttaaacgtagctataaattttcgtgtttaattttaatcgttcattttattttataactaataattttatatagttattagatgataaaatatgaatattactttaagtgtgactcataattctattaaataattttttaaatataacagacaattaaaattagacacgaaaactcatagctgcgttttttaaatggacagagggagtattctacagtacaacattttccttttataaaaaggagacgagacgagtcgctcgcctcgccgccaccttccccttccccccctccgccgcctcctccgccgcgaaacgaaaggcgagctctctctctctctctctccgcggcgcggtcaaaaccctagcgcgcgaggaggccccccccatggcgcagcagctctccgcccccttccgcgccgccgcggccgccggatcccgcgcctccgccgccgccgccgatcccgccaaggtatcgccctcccttccattcctcctgtgctccctctccctcaccttcttccccaccccccctccggaattttccggtttgttccgcgtcggggttcgattggcagagggttgggacgtcttcgttcgttgtgtgactagttgtgttgctgatactgcgcctagatttcgtcttaagcttggtttccgtgaatctgggaaccttgggttggggggggggggggcaaatgctggggttcgtttcttgtttatgtgcgttctccctggttgcttcgtactataatctgttcatttctgtgctggagtatggaggttacttttatacatactagtggagaatcatgtacccaggcgctttattgttatcagcaaaaagttctgtactgttatcaacatagttgattcttggtcaaagaaatcctattcacactcttcaattaagatgttaatactattcactctcttcaattatgtgttgctcatagttagtttgttggatttttagttttttagtagtagaaagatgtccctcctgttgatgcgatttgcctgctatggaacaggtgttacgcttgagaagcgctggctcagctcagttcacctccatcgcagcttcctcttcattgtaactgcctgcttctaatgcctatttcttcctcttcgttgtaagagcgcttttttgatctgattatgttttaacgcatctaaataatttttttaactcaagtgctaggaacattgagccgctgagagcgatagctactcaggcaccccctgccgtcccacgtaagtgtctggtttcccaaacaaatgtgtaataatagaattgtgcaggcagcagcatttgattattcctttttgtttctgtctgtagaatattcgagtggcgagaagacaaaggttggcatcaatggtgagttgcttctgtttattctaggaactagtccattaattttaatgggatatattaatctgtttattctaggaacctagtccattaaaaaaattgctataattttaatgggatatattaatctgtgctggccaatgcattttgtcttgcatgcgttttttcttttctttttttgcaaatatatgatatcaattgcaactgaatgtgttagttcgagttccatgtctttaggttttccaaaagcaatttttagtgctcagttaggtatatgctacagcaactgaatcacccatggcttgttggcagaagtagtttacagtttattgtaccatacatcaaaagtaggcgaaataatttattgctatttgtttgtaatgcttgtcttatttttttggtatcatagggtttgggcgaattgggaggttggtcctgcgtattgcaaccagtagagatgatattgaagttgttgctgtcaatgatcctttcattgatgctaaatacatggtaagaaaatagttcaaattatttgcctacctcccatatttcataccttggttgcttcatttaatcaatgaacattatattttcaattttggggggatgaagttttgcttgcatttgctacactgcattagcttatatgatgccatgttacgttcttttaggtttgtaagtgttataaaccttgacgaaaagattggccttttctcagcttaagctaaattaagattgatgcagataatattttatttgaaatcattgaaaaacctacttaatgtgcattcaccttaagttacttaaatatgctatgcagtccattgtgctacatttcaatttgctagttatatattggcacagtttcttggttcttccatataatcacacgaaactgcatccctaccttatgtgttcggttcaatgaccataatagtccatttcaatgttttactcctaatgcaacataattcctgtcactgtgggagtaccaacccatccttccatgcggatgcaacatttggttgtgccttttctttctgtagataatctctttcttttttccaggcctacatgttcaagtatgactccactcatggtccatttaaaggctccattaaggttgtggatgattcaaccctggagatcaatggaaagaaagtcacaatcactagcaaaaggtaatatcaagtccacttagggactagtacatgattacatagaatgtcacaattatttgttatctaagtattgtgtttgatgattattagtaaaaaaaaaccctcttgaaacattgctagtaaatttggatctcacaattattgaggtattgcatcactgtgttcccatgccatcatggattcaacctaaaattctttggatcactggaaaaataattattgtagcctaacgtataatctggtcttttgtcgtatcactgcttacttgtatagtcgaatatattacaatgtgcagccttgtgaaataaagaaaagtaaagtgtctttacgactctaaccatatctggagtatggagtgattgactgaacatgctatacggatttataattgagtaccttttagtcctagctcctaaagtaactcagtattgttgtgtacgttgtacatttggggtacttcacaatcctttcttcaccgtgcccctgctctcgatacacaattatgtttctgtgactacattaatttctgttagttcttgcatttgcacctaagaatttgcccccttcttttccagagatccagcagatattccttggggtaactttggagctgagtatgttgttgaatcttcaggtgtttttacaacaactgaaaaggcatcggcacatttgaaggtttgtacaccatttctatacattgccatctaactgagaaatggcaagcttttatattggataaaatggtgatgtttttatgccttgtttgtagggcggtgctaagaaagttgtgatatctgctccatcagcagatgctccaatgtttgtcgttggagtaaatgagaagagctatgatcctaaaatgaatgttgtttctaacgcaagttgtactaccaactgtcttgctcctcttgccaaggtaacttatctatttctaatcctgttactattttcccattttaatcataacaaacaatttgctcttgtgatttttcatattttcgtccatccaatggagctaattgatattccatgggtatgcaggttgtccatgaggaatttggcattgttgagggtctcatgacaactgttcatgccacaacaggttttctttcccttatgaattttgtcattgtcaaggatggagactgccaatttttcagtctcctcatatcatgttgttcattagtcataacagacttgctttcctatattcagccacccagaagactgtcgatggcccttcaatgaaagattggagaggagggcgtggtgctgctcaaaacataattcctagctccactggtgcagccaaggtacgatgaaccaaaaatctaccttgcttttctagatttctgttttggctgactgttttgattccttattaggctgttgggaaagtcctccctgagctaaatggaaagctcactggtatggccttccgagttccaacaccaaatgtgtctgttgtcgacttgacctgccggattgaaaaaagtgcatcctatgacgatgtgaaagcagccatcaagtatgtaggactatcatttgtccatgcacattatctgctgtttctgtttggtcaattgttttaagtcttaaaatgcttgagttggtatacagtagccttcaataatttgaacgtgaacagaataatacttgtgttcacaaatgaattgcaaaagtaacatatcccttgttacgtcttttgactgtgctagaaactgcggtcatgcacttgtaccgtctgaagattctgtgatgtgcctgtatgtaacattgtgaatcttttatcagatttactcataagctgtgtgtttcagggcagcatcagagggtgcactgaaaggtattctaggttacacagatgaggatgtggtttccaatgacttcgttggtgatgcaaggtaagtacttctagatgtaccgatgtaaattgtgttgtgctcaaaagggagtggttgacataactgcccctttctgcatatcaggtcaagcatctttgatgccaaggctggtattggactgagctcttccttcatgaagcttgtgtcatggtatgacaacgagtggggctacaggtgagtgtctatatttccattaaggggcttaactcttcatctttttttccaattgttctattgtcctaatgattctgttccattctttgtttcagcaaccgtgtgttggatctgattgcccacatggctcttgtcaacgccaagcactgatttgttgaaaatcctcctccgatagtatctagctaggaaaggctgcaattttgacggtctctttctgttgtcttggaataagatgtaaacttggaaacaaagcaaaaaaagaatggacattgatgtccatgacattgtttgtagcaggcggtgaaatttactctgtatcgacctgggcaagcggaactgttgagtgaaccatatgtcggcaacctgattgattcattgagtccaatgctatgccattctatatttactttaaacatgcttgtttcatgccagaaatgttcaacagacaattggcaatttacctcaactccagaatctgcagaattttgtttcaattcagcggcttgttgagagtaacagcagagaattatgtaggctgttaccaagagggaaagtttccggctattcaccttcaataaaatcagcagcagcagcgatcgaggagaagccgaaggtgtgccagagaagccgtgccagaggagccgtacgtgttggtggccataagtcggaagcaaggctatacaattgcatagttccagtagcttcataattactgcttttcattgaccatggttcccattcgttattctctctatccatcccagttttatatcatatttgtaaatggagccgagactaaagcaacaaaatctccttccttcttaaaattaaatctcatcggtcaaggtacgcaaacgtgcagacatgtaacgatatcatttactcctatacacgtaaatgaataagcatgcagcgatgtcatttactcatatacaaataaacgattagatgatgattaaaaagaccttaaaaattttagacaatgatcaaattggaatggaggaagcacttcataacatatctcattgtcgcttccaatttttcatcatgtaagtacgtctcatgcgatttttttttgaaaataatacgattttaatggaaaattgtaaaaatataggtcggttagacgaaatcgcaagagtagcagcctgtcgaacaaccggggttcgacattgaacaaccacagtttaactgtggcagttcgacaggtgattaaaaaacttcaaaaaataaaaacaaaacattgtagcagcactgtagcgcactgtagccacgaccagtcgaactttgaaagttggatatgtctgcagcgatactattcacgcgaccctatcaaactttgccagttctacatgttctcgctgattccggtagcagtacttttttgttttttttatcaactaccctgtcgaactgcacccagttcgacaggtgcatgttgaactacacctgtcgaaccacggttgttcgacagggtgctaatcatgcgatttcgtctaatcgatatatttttgcgatttccattacaatcgtattatttttttaaaaaaattcgtctcatgctattgacacctcgtataatcgtatacatgagacttgagagtactaaacaagcaaattcacctcaatgctatctaaaaaaaatgaaaatagttagcaacgttacattttgtggcccacttcattgtaaagatgagcccgacccctctatatttggctcaaccgttaatctatcatcaatcattaaattttctctttaatgccaatttaaacgattctattattgactatactatccatgcatgttaaacgcctatttattttctctctaatgccaatttaaacgattctattattggctatactatccatgcatgttcaacgcatccttttttttcctagttaattgtatcgtcctatggttaatggatagcaaaccataaattctttccaatgttacacattttatccatatacccattttcaaaaaagaattcacctttcttgtcctataaataggcatgatatcctacccttgtgcttagaaaaaaaaaactacccaccctttgggttctgcacctaatagcaactggtatctaaggtttcgtgtttcgccatggcttgcaaggttgcctccatatttgcatccatcctaatattgtcggtcctcgtcatgtcttgcggtaatatcatagtatacgtacactctttttgcgtattttatgaagcattgggggctagtaattaactaatttctcacatatatatacttctcacaaacaaaaacttctcttaattttggcttgaacagatgcagctggtttatcctgcccaactgtaagagcgccgaatccgacctgcctgagccctcaaatttgtgctaatcagtgtgtagcagctggttatttgattggattctgtgagttttatggtagtcgattgggtgactgcgtgtgcaccaaatgcacaaatgctgtgcaagccggccgtcctcctactattgctcctactcctgcagtgagaaggttgattctgtgagaaaaatacatggcatcatcaatttgtgatggatacaccatgggaataaattaacttgtgtgttgacgattgctgaatttgttgaatcgagttgttttcttgaccaagtgttgaatcgagttgttgagaattaagaaaataccaactatatatatggtgaaattctaccttatttggtgaaattctaccttattgtgtccggcgaaattctaccttgttatagaggaaaaacctgagtatttttcgccccttaggccttgttcggttaatccctgtgagggagggattggagaggatttattccacacctactgcggtgtggaattattccccctcaatcccctccaatccaatcctcttcaatcccctttaaactgaacaatgtcttagtaggggtgttctatgttttaccacccgtacatgatatgtgggtcatgatcaacctatagtggcaatgactaagtttcaactaccagtgaaccgcaaatcctagagttcgactaatagtgggcgtgttcggctggcagtgttgtggctacaaccgtgtatcgaacgcaccctgtaaagcaggaaatttctaaaaagaaaatactgtgcatattatgtttgtttatgattttagtacgatccatcgctgcgctgcccatgtggaaagaggaatccaattttgcgttgaaccgaaacttgcagccgttaataaacgttaggagagaaacatttgatcatacaaccatcataaacagaaatcacgtataatcggtgctcaatcctcaaatcccccgtacaactgatgtttttcctcttgtgtatttacgattttacatcaaggtgatgctgaagttagcactggaaaatttggataagttgatatctgatttttttcccctggagaaatctgtattctgatgaggattgcataatgggcagtcagtgcagtaaaaaggggaaaactttactgtccaacatgattcagctgcccaatttcttaagaaaaatgggatatacaagtgtaattggcttgatcatttttttttaaaaaagcgatttcttcactacaagaataggcagggcacacatatataggttctcatcttgcaaaaaataaataaacaaataaatttcgactactacctattacgtcttgagctcttgaaggactttttaagtcctgaacttttttttaatacgtaaggagcgcatttttttatcaagaaggaataaatgtacggaaatgctgcgtgctgggcgtccaacggcagaagaaaaaatcgggcgcccacgcctcccaccgttgctactttaaatagttttaaaatgatttttctcctaaactaattatccaatttacgatccgatcacgccgttgtattcgttgcaattaaatctttacaacaagactacacatgattatatttcgataaaaaaatattttagcttttttattgatatgttttgaatgttacatatgatctttttgatgtttcgaccagtagttttacggtgtttcagttagtgtactcgcgatgtttcactatgtacagatcaaatgttgcatcaaatgttgcagtggattttgatattatggaacgcgccgttgcaacaaatcacgcgcatattatggaaaccctctattaagggaatttggtttattttttattctacacaaaatgtttcatctagtgcactcacaatgtttcactatgtatagatctaatgttgcagtgaattgaaatattccattgcaacaaatcacccacatattttggaaaccctctattaatggaattcgttttattttttgttccacacaaaatgtttcacctagtgtactcacaatgtttcactatgtatagatctaatgttgcagtgaactgaaatattttttcactatttgttgaaacattgtttttatataaggtgaaacaacacctgatttaaacgagtgagacattttcgatctacttagtgaaacaattccgatatacctggtggaaaatcgtgcaacatttaaaaataattcgataataagataattttttttcgtcggaatatatccatgtgtggtcttgttttgaagatttaattgcaacagatttaatggtgcaatcggatcatgatttggataagtaatttaagagaaaaatcagtttagagtaattttgcacgtaaatgttttggataatcatgttattctcgattttaacctccttctatcggccgcccgagccggagtcgcgtccataaatgtatgtacaaagcgggccaaaaagacaaagcaaaagggacgaggtacaagaggagaaccaagaaccaaaagcctaatctccaactaaattttgcgacccttctccactaacatgagctgccaaaacagggattgcagctctagctagctgccacagctccgtttcacccgccataacccttgcaacctccgctcaagttctgctcttctggctgaagactcgattgtttctttcttttcagatcgtccatgcaaccaacgtcgtgatggtgtcaaaacctcggcgatcgtccatacaaccaacgccacaatggtgtcaaaaccccggcgatattcctttaccatcttcttgcgacagagtcctgaacttcctaacctcgttctcgaagaaacgtgccttgtgttccttccacgccgttgaaaagctctggtgctatttttttttcttacttagattttttgtagataacttttgttaattagataccaaggagcagctgaacctgaacgaaagcaatttctgcttcagaggacctcgatgaagtaaaatggaacaaagtcacacatagcctaatcagggaatgcatgccaagtctcaaataagctggatcatcctgcagttagcaagacactaagatattaacacaatcctaaatgccattattagttagctgtgtggatatagagatcatatttctattcattattaaaaaaaataccattattagacacagggttaatacttaccccttatccacttatacatcttgatcaagatttttatcaaatcatcaatgccatccatttccaatcagtggctgatttcttacaaatagtcacccctgcagatcaaatcctgaaagtgcatctaggaccctaatgattttgatgattgattacaatgcgattagagaggactaacacttttattcaagcaaatgtgaaggttgttatgtcctcaacatgttgtaatgagatgcataccccatgaatgcgacatcacgatgcaatgcggcaatgatcaaatggtatattgtatcttttaccttacattgtgtcgtaggaatgtcgtactattaagagggataccacatgcatattattggtagaatactagtgctcaaaatgcttcatctttgtgtgagttgaaaaacctaagtcaaaatttcaatcccgagttgtttcacttgtcacaacacttacaccgggtttctttgcaagtttttcaacatctcttgaaggttttggaccatgttttatgttgggtttgatagcccacgaaactagctttccatagagtccaagatcttcgaaatcggagttcggagtaaaaagttattgcagttttactttagcaacatcagactatccgatttgaaatcagactatccgatgtatcggactatccgatttttcacagaacttcactctctatcttgatttgaaaaaaatcctatcgagtgagtttttctaagtatcggagtatccgatgtcggatcagatagtccgatgatacagagactccgaaatttcatagaacttgagtctctgtttgaggacaaagtttttgcttctaaaatatcagatactccgatttaacatcagatagtccgatgtctcgaaaagtccgaaatttcatggaacttcgttctctatttctcgttgccttggaggtttaaaatatcggactatccgatcttgtatcggactatccgacgtgggctgaaagattcccctccaacggccacatttttggggggtctataaataccccccacctaacccttttctagggttacccaacccatttcattctcattcactttgggttgagcttggtgctaaggtgctttggatctttgagctctttctccctctctcaaatccctccttgttctttgtgtggtggatcttggtggttgtggatttggtgtttgagggcctagtgtgtgtttcactcgatcttgagcactagggtttgaccaagagttgtgtggtgtttgttactcttggaggttgagtactcctagacggctaggtgtcactcccgagccaccgatctacgtgtggttggctgagagaagtttgtgaaggccggatctcacctccgcaaggaaaaagataccccttagtggaaggaggagtgcttagtgcaacctcttgaggaaagggttagcaaagacccggctcttagtgagctcctcaacggagagtagaatcccctcaaggatttgaactccgggaacaacttcatgaacttcatcattggtgatctcccttcatcctccttttagctttgcttaattgtgccgctatagatctagtcgctgtttgtgctttactcttgtttgtgtgatagatctacttgttgtgcttcattggtggatcggacagtctgatccaacatcagactatctgatattttcggatagtctgactgtggatcagactttccgaccttatttcagttttagcttctgcataaaattttaaattagcctattcacccccctctaggcctaattgaccctttcaaatccaaccaaatccaataactccatcccctaaaaaaaatccaataactccagagatttcagctttcaggcttttagccatggcttattgcagctgcaagctcacaccagcagcaatggtggcgtccatattattcctggccctcctcctcctctcccctccctgcagtaagtacacatgccaaaacaaacagcagcaaaaactgaattttgatttggtttacattcactctagtgtgttcatagggaagcataagtggtgtggtagtgaagtcatggatgcataactccacctataaatatttatatccgcgaatattacgctgttgacagaaaatacgaggcctgggagatctgcttaactccagtgcaggtccaaagctcgccttcgaatgtatgagcttgccagttgatttgatcctataatcaacaagaaatagagacaaagaattcgtggttaaatctataaatgatagctgatcggctaggtgccgatgacatatcatttatctttgagccgatatcatatatgaatcgatcggcggttataaatagatagtaaggaactaaatctattcgatcggctgtagatattaacgatatatagttcttatattaatatatacttaaatcaagtgattgggatagatcggtcaccatgccgagatagtataaatcacttagatcgaaatatatattaataacatgattatatatgtttatagcatagccgatcagatagatctagaatgtatcggctaatactccgatactactttatataaagatatcaaaacaaatataatataccaaacaaaagcttaatatacttaaatgcaataagatcctgacataaagggcggatttaacatgtcattgaagcatatagatcgaatatggttaaatcagataagatcggctgaaactccgatactaccctaatcggcaaccagaggacatgctagagattgatattctaagcacgacttaatagatcaaactcaactgatgcagcattaagtatgaaaagaagaacaatatctagacaatcaagccgctgggtgtttcataaagtcttctattaacagatgttagccgattataggttagatgacgatattgccaaagattatgtaggatatatgataacttgatgaattatatagacaagattagagtgtcataaagatggaagcactaatctcgagaacgcaagtcatcataacaagttttacctcttgttgaaaatcgaaaccgatgcagctcaacccgaaagcaagaactcgtcgaaacaaaactaaaacaaaaaggtggcgatgcgctgaaattgtattgaacatgtgtgttctttttttaaattacatagggctcgggttctatttatacccgagaattacaagatatgtccataccggacacggccactatctctaacaaactctaagatatcataagtctttgcggcagacttttgcccaaacatatctctaaggaagttacataaaacatcctaattaatagatacaattgccttctcaggactctatccatgtgcggcaatcatcttgaagcacctcaattcaacccaatatcatacaccaaatcatactgtcagaatcggacgcatcggctcacctagtccgacttagacccagccgatcctaatcgtagccgatctggacttcagccgattcttgctctgttctcggatcaatctccgccttcgactccaccttgatctaatctccttttccgatgctgatattaccaaatttggtcgttaacacatgccccccaagtccgggatatttgataatgttccgaatttgccgtgtaccgattctgagcaagtttcgcactctgccgtttttcaaccgttattctattgctttaaataccaaccattgccctcgagaaatctcatgccgtgacttccgttttcaccgctcaagcgaaaccattactctccggcgattcctccgacgcaaaagcgatcccctggcgatttcgcttttgatcagatctccgcctgcggtgatgtcgtcttccactatcccgtctactgcgccatcggccgagtatgctgaggtaagttctcaccggctagatcccttttcctcgcatgaaatcgatttcttcttttctcattatgttttctgcttcctgattcctttggatttgcagcacctttccaacctagttgcgattcccagcctatcgcacaaaaaccattattttcttggcccaatcgacaatcttgactccactgatttcatcattggtgaaaccaacagaatcccctttagactagccaaccctaacttgggtcactggaagaataccttcaagtcttggctatctcttgaaaagcctatccctgataagagctagaccacctggtaccaacgcatatcggctagtaagaaaacccactgggatgagattgggatcggccaagcgcttgctctcaccatagccaattctgctaaggatgaacctctgatggctgccgccacctatttctggtccaacaccatcaatgccttcttatttaatcaagggccgatgactccaactttgattgacatcatcatgattactggattagatgtaacttcatcggctaaccctataagtatgaacaccaagaaccaatttgacttcaagaccaaaagcataggagggtggtctggttatgtagcgacatacatgggcaaagggcctgtcactcctcgggagcacgtagctttcttgctaatgtggctagaaaagtttctcttctgtggatccagctgtggtcccacaaccaattggcaatttgtagccgaagccttaggttcaaagaaacaatttcccttgggcaaaatccttctcggctatctataccaaatgttgaacaatgcatcggctaagatagccgtcggctcaatagttggagcaggtggaccatggtggctactgcagacctggctaaacctggtagtcatgaaagttgtcaatcggccatctgtaacagaagctgaattcccaaggttggagccaattgtagaagacgatggagaagaacgcacccatcgcagatgcatgtcatatggagaatatgcatcgacaccagccgatgctggtgcaaaactatcggctgagctgctcaaagattggttctgcagcttttatgaaggcttccagaaacatgcccgggtttagtttctttatgaagacttagcagaccttgagctcccattagacttcagatttgaaaacatcaatcgtgaatgatatcaaacgtccagggaagtctttacagctgcaatcagcccatgcatcctacctgtcggtattcaccaaggaagaaatatccaagtctcctacgaattctatcaccctataagttcagctagacaacttggattaggccaactcccaatcggctttttctttgctgacaagatccaatgccgaggagaaatttcttcaactctaatgatggatcgactgcttaacctccaaggacctcccttaggcagtatcgacaatattgagttagcaggattcaggagcaggaactttgacagatggtggggaatggaaattgcatctatttcatcaatcggccacaatgtacatgtgtcacgtcccaaaacgactctaaaatatatcccttaaatgatgcatagaataattaaaatccgtgtgaaagcctccaacaattaaaatgtgcaaagttaaaagccaaataaggcttagaggatttttgtaaatttcctaaaagcctaaaatgcgtaaataaattttagtggaattttcagagcacaaataataattattaagaaataaacaaagttaaaatgattttataaaaagaaaaaccctaaaagtcccccttccctcccttgggccggcccggcccatctctcctccccccctctctctctctcctctccccgcggcccactcggcctctccccgcgcgcgcgccgctcacgggcgggcccgcccgccatcctcgctgacgggtggggcccacctgtcatccccttcctcccgccgctcccgttgcctcccccgcgccctagcgccgccaccgccgtgaatcccgccgcctcccgccgtccccgcgtgcaataaagtgggggggaatcactccccgtgatcccctctccctttccccctatttttccctctctctctctcgcattcaaacgggcggatttgcccccgcaaatctcgccggcgccattgatggcggccggacctcccacgccgattttcttcccctccggccgctctctcccccttccaaccctatttaaaccctccccgcgcctccctcgcccgtttccgccccttgccgcaccgtctccccaccggaatcgagctcgcgccgtcgccctctctctcctccgtcgccgacgacctccggccggccttctccgctcgccgggaccgtctcccgccccggcgtcgcctcctccggcttcgccgcaccgccgtcgaccccgtccaccccctcgccgagtccgccgaccgccggaacgccgtcgaccccgtcaacccgagccgcgccgccgcctccctccgctccggccgcctttttcgtcgtcgccgtcgacctagggtgagccgtggaccaccgcctcttttcccccttcccttctcctctctcggccgccgctccgccatgcctatggccgccgccggcgaccataggggtgcgggcgccgcctcctgccggccgcgccgagtggccgccgcgtggggcccggccgtcagccgcccgcgccctcgggtgcggctgacgcgtgggacccacggcgccggccagtgcgagcccgggtgcgcccggtccacgtggaccgtgaggctgccgcgtgggccccactcccgtggacctggtccgcgcgcctcctcccctcggctgacgcaataaaccctttttaaattaaaatttaaatacagaaattcgcaaatattcatttaaagagcatataaacttcaaatggccataacatggccatttgaactcggaattggaccgttcaagtctctaatttttccttaagaactcaagaacccatttttgtgctttgttcctgcttattatatggagtttattagagtaaaagcccttttattttccgttggtcgtgtagacgttgcagcttcggaagatccgctcttcgtggaggttgaagctgacgtttgggaaagtgagcaaggcaagtcacatcatccttgaacatattgaatcccagtttaaaaaattattttgatttaaattattgcattatcgctttatttaaattcccgcgttatcactgttttatctagccatgcttatttacctttgttatgaccttattattgttattgttattatttccttgttcaccctagaataaacaaaaccccaactagtggacactctactcatggtaccactagtatgattttaggtagatgcttcgctggttaattaggcaatattaggtggttttacaactctagactttgggaatactcttatcacctggacactatggaatggttggattattatggaattggactcacacctccccctctattcaaaaccctcaaaatggttttaggctgggctcggggtgcattgttttgatagtagcacctcggccatataaggaccgatcttcgggcctctgttgcaaagcactaccgtacttccacatgtctagtgggtaaggcttagtttgtggctcagtctggttataaacaaaagtacacggatggagatggatgaagtcgggagtcgatggacatctctagggcaaatgaaggctacacgagctgcggcccggtagtcgagatgtcatggcacagggccggtgtcctgctgttaggggttcaatcctgcctacctgtcccgggggttccggccgtaggtggggttgggtcggtactcttgtttatggctaggatgggttggaaactatgtcatgtcttccgtccgtataccgtggtggtatgtggcacgtggttacacgtgagaaagatgtgtcttgtgggtaaagatgtacacctctgatcagagtataacctattcgaatagccgcgccctcgtttatgggcaagccgagcaatgtacccaagttagtgttttaattcttaaaacctgcctaacagctaaaatgtggaatggttggcctgggttggcttgggacgagctgggacccagggtcgggttgccagttcggtctgaatcatcgtaggccttgggttaaggcaggttcgtgtgggttcacggccttggttaataatattgtatagctctaggaccgtgtttacaaagtagctttgagcaactaagtgacttttaatgctgtttactgcaaaccctaaccccctatattatggctcccttgtactcccttgcatttattctgcacttgtgggtgtgtcttgttgagtacggtggttgtactcagtcttgctcaatttttcccaaacccagaagaggagcccctggatgatgaaggctttggtgtctagctcgtgcctgtcgtcaagcgcctgtggtcgtcgccctagtcttccgctgtttttcgtttgtcttcttgtgtgctgggccttcgccgcccatgtaataaattaattaattacgcttccacttgttaaactctgaattgtatcaatttttggtgtaccttgcctcctgggacaaggaataatgtacgcacgtaaggaacgcccgttgggttatttccggtcgtgacaacatgacagatctattccctgacgtcataccccgggtaaactttgtcatcactaaatttcataacggttagccgattcattacttgactaatcttttgttcctgttctgtagacaacagtgtcctcccctccacatcagagcaatagtggtaggaacattgaatatgccccaggtctgattcctaatggaggcggattgtccccctctatcatcggctatcatgcccccaaggtctcaaccctcctccaaggtgccatcagggaaccaaccgatgtaaccaagaaaagaaaaactagatcatcggctgtgaacaccttgactctagctccaaagaaaaaggccaagtctaagaaaaccaagccaaccgacgacctgcctgctttggatccatccattgaacaagctctggatgaagaagatattgaggatgatgttgatcaggctgcagccgaagtaagtgatactaaaaaaacaccatcggcttcgcctaagcagataccttcaactccttctgcccccactcacttcttcagagtaaaacatctttccttgcaaaccctattataatcattatttttcagccgactactcataggttttgtagttgcaaaagaagaaaactgctataaagaagaaatcagcagcaccaattctcaaaccagcttcaccagtaagacactctcaattttactagttgattttagccgattttgtctaacacttgtctttttacagcctcctcctccttgttctcctgtacaacaatcaccgagtgaccgaactccatcggccgtggggagtcatcatattgtggaagaagaacaaccggctgctcctgctatcccagtaagttttcctttgatgcaagaatttagatcgactatattgacttagctctcaaactttctgaacttatacctgtaggttctaaccgatctcttttcttttgatatcaaagattatcttgatgaggcagaagaagatacttcaagcaaagctctagttcccttatctaacgatgcaaagaaaacacttgaagatatctcgcgtcggctagaggcctcttctctggatagcttagtggtcgactgtggatcgattaggacacgattgcacgaagttcaagctctaattcctgaagaactagccgatgtcttaactccagccgcttatcttgagcaacatcaatttaaactagcaaaagccaagctaagattagccgaacaccgtgagcgcaaggagattgaagccacaatccaagtcaatcggcagcttgtgcatgaagaaaaagtcaaactcgatcagctatccgaaggtctgatcaaatccaatatcgatcggcttgaagcccgcaagattgatctctttgcacagcttgaagaatgcaatgctgaattggatatggagcacaaaaagctagccgatctcccaaaatctgtcgaagagcaaaaagcaaggctcaaatcggctatcaagaatgttgctgacctaaccaagtccctgaagatcatttctggaactgatgctcaagatgcccaagccattgaagaagtggaacaaattaggaaaagagctatttcggctatccagcagtacttgtctcaataacttttgtgtaataggacttaaaaattcttgtaatcggctaagataccttaataccctgctgttttaacaatccttcgtgccgattaacataagttctaattttcactttcatttttggtatatatgtgccccccaattttataatgtcaacagcattgataaaattagaaaaacaactaatggcgatataacaatatcggccgttatatatcggcaaaccataaccgattacaattggaaaaacgactaagggcgatataacaatatcggccatctcaagacgatgtaaaacacatcggctgtcatgcatcagcaacactagtcgatcatgcgtcaacccaaacacttgggtaatacttcttcaagtatttgccattgagcgctcatccataaacctcaccatcaagcccttgcaacatatatgcccctttagacacaaccttatagatttgaaacggtccttcccaatttggtgaccacttgccgaacttgttatcccgagttccaatcggtaaaatcaacttccatacaagttcaccttccgaaaaatccttaggcactactttcttgttatagtgcctagcaactcgttccttatctttggtaaccttagtaagggctcgtaaacgcgattgaaccaagtcctccctctcatcggccataagattataatactcatcggctgtcaaaccatcttgcaattctatccttctagagccgattctaacttcccatggcaaaacagcttcatgtccataaacaagcttataaggaggaacttgaattgatccatgacaagccatctgataagaccacaatgcttcggccaaccggttatgccattgccgaggataatcagaaatcttccgcttaattaatttgatcaagctcttgttagatgcctcagcctgcccattagcttgtgcataatatggtgaagaattcaataatttgatacccacgctatcggcaaactgaacaaactcatctgacacgaagattgaaccttgatcagttgtaatagtttgaggaataccaaatcggtaaattatatgttcttgaacaaattgaattgcatccccagaatcaactttcttcaaaggaatggcctccacctacttggtaaaataatcagtcgccaccaatataaacttatgccctttacttgatggtgggtttatcataccgatcatatcaattccccaacctctaaatggccatggtttaataataggattcatagctgacgccggcgctcgttgaattgccccaaacttctgacaatcttgacaccccttataatatctaaagcaatcctccagcattgtcggccaaaaataccctgcacgccgaagtaaccacttcatcttatgggccgattggtgagtgccacaaattcctttatgaacttcgccgattgcaactttagcctaatcggcactcaaacacttaagtaacactccatcaatcatccgataataaagctcatcatccaatagagtgtacttcaacgccttatatcttaatttcctagaagccgactgagatgtattatgtaaatattgatgcacatcatacctccaatcatcggctgttattgctgcaatttcaaccttaacatctttgatcatcggcttataccccgatgccccttgggtcagatcattagcttcaatattttgttctcgagatacatgctttaaagtaaccagccgaaattccttcatcagttcttggcacttctcattataaactattaacgtatcattcttgcattcatactcccctgccaattgactgattaccagcaaagaatcccccatgatttcaatagcatcggcttcaacttccttaagcaattgcaaccctttaagcactgcttcatactcagcttgattattagtcgcataaggtttaatagtataagcaaacttgaaacatgccccctaggggaaattataactaggccgataccacaaccatgagtacacaccgatccatcaaagaataaagtccatggcaccatttcaaccgagccgattgaatcatcacgatgttccacaataaaatcggctatagcttgtcccttaatcgccttcgatgactcataccgaagatcaaactcagttaaggaaaatatccactttccaacccttcctttcaatattggagccgataacatgtatctaacaacgtcggccttgcatataatagtacattcattggacagtaaataatgccttaacctcgtgcatgaaaaatataaacataagcataacttctccacaggagaatatctagtctctgcatccaagagccgacgactaagataaaatacaactcgttcttttccatccaactcctgaatcaagactgagccgattgacttctcaccggccgacagatacaatctaaaaggtatccctttctgtggaggaatcaaaacaggaggggaactcaggtatcctttaatattatccaaagccttttgctgctctgccccccaagtaaactgctgatcggccttcaatctcaacaatggtgtaaaaggttctaattttccggacaaattagaaataaaccttcgaacaaaattaatcttgccgatcatctcctgcaattcggtcttgttttccgggggcttaatctttttgatcgcattgatacttctctgagttatctcaattcccctctcatagacaagaaatcccaagaactggccagccgataaaccaaaagcacactttgtcggattcatcttcaagccatatttcctggtcctctcgaaaacttttcttaaatcggctatgtcgtcttttattcccttaaatttaacaaccacatcatcaatatagacctcaaccagccagccgattagattatgataaatataattcatggcccgttgatatgtagctccagcactcttcaagtcgaaagttataacaacccattcaaataagccgattgcaccaggacatctaaaagctgtcttatggatatcttcttcagccataaaaatttgattataccctgcgtttccatccataaaactcaaaattttgttccctgacgcggcatcaaccagttgatcggctactggcattggatattcatctttcggtgtagctttattcagatctctaaaatcaatgcataccctcaccttgttgttcttcttgatgacaggaactatgctagaaacccactcagcatatcggcaaggacgaataaaactagcatcatataaacgcttaatctcagctttgacaggttcaagcatatcggctttgcatctcctcggaggctgctggtgcggcctaacccctggtttgataggtagccgatgttctacaattgatcggctgagtccaggcatctcataatactcccaagcgaagcaatctctaaactcttttaagagctctatcagcttggttctaaattctggagacaaattcttactaataaatgtcggccttggctgatcgcctggacctatatctatttcttccaaatcatcggccgacataaaaccttgaccttgcttgtcatcgagatcatctaccgtatccttagtgtagacacttgaaccctccacgacgccctcaaaataatagcttgggttctccatcttcaactggctgtatatcagaatcagacacttttagaaaatctccattccaaacttttccagataaacaatcaaggccatccatctcccaaatagctaaatctgcactggtaacattaactgacctgtcggctggtacgatctctattttgtcgccttgccactgaatcaagcattgatgtatagttaaaggaatacaataattggcgtgaatccaatcccttccaagcaacaagctgtaagaacccttcccatcgatgacaaaaaacgtggtaggaatagtcttactgccgactgtcaactccacatttagaacacctttggtttccgatggattgccaccaaagcccttgagcaccatatttatcttgataagatcctcggcatttctacccaacttcctgaacgtagcataaggcatcaaattcaccgcggccccaccatcaaccatcattttagacatcggcttcccattgacatagtcatttatatacaatggtttaagatgccgattctctgtcccctcaggcttctcgaacaccgcctgttttggtgacagaaccaacttagccgattcctcttccacctcgtcgacatcggcttgatcgatcccgaattcagttggcaaggtaaaaaccatgttaactagtgccgtcacaacactctttccttttaccaacctctttgcctcatcagctgcaacatcatcggctacatgagcctgattcttaacacgccactcctgcctcggttttgctttcttcagccgatgattaatttcttgctcgacctcctggaagcgttctctactcctcaatctttgaacccttcttttctgatttttcgtaaaaataccaggaggacaccattgagtcttcttattttcgtcatcttccgaatcaccacgttggtttactgggcccaatctctgatgaacaggtactcttgtctgttttggccaatttcctccatcgtacaatcggcttgaaccccctgcaacatcactgcatctaggacaatcctcgatagatggtaacctcatacattcattccaacagaacctgaagaactcacagccccaatgaggatcaaagccaccattatcttcttcatgatgcctttcctgttgcttgtcgtatttcctttgatatttgtttataattctagctgaacttacttgataacccctcatgcgccccgtatcagttgttcgaccagctgtgtgtaccatgttaacgggaaatgggttaccatcgaccctcatcggctttttggaatcatcaaacttaatcttgcctccctcaatggccacctgaatctgttgtctaaacaccttgcaatcgttagtagaatgggacccagaattatgccatttgcaatatctctttttgcctaattcctcatccgatggaatcgtatgaccagcagggagttgaatttgcttctctcggagtagcagatcaaaaatcttgccagctttagtaatatcaaaatcatacttctcttcctttccagaactctttacccattggcacggtatgacctttttactcctcacccattcggctgcagctatctcagagtcatcttcatcgtcatccgacccatacatgtagggacaaacatgattaatcttcttagagcttttcctagcctccgcagacctatgctcatgcaaggttaccttttgtatcagatgtgacaagctatcaaagtcttcagacgagaatttctccctaatcgtgcaatcataccctgaaaggccagatcggctaactgagcgtcagttaaactcaagctgaagcatttgttcctcatctccctgaatctctgaatatacttgtgcacaggttcatcatgccgctgcttaatcgccgtcaagtcagataacttcatctcatgaaccccactttagaaatagctgtggaattgcttctccaaatcggcccaactattgatcgacccatacggcaaagaagaaaaccaagtaaaagctgatccagacaaagataaccggaacaacctaaccctcagagcgtccacagccgatgcttcaccacactgagctaaaaatcggctaatgtgctcataagttgacacaccatcttgtcccaaaaatttggagaagtccggaactttgaaccgattggggagaggaactctctcaaaccactcagggtaaggctgccgatacaagcttccagtctcttttggtttaagcccaaactgttccctcattacatcagcaatcacatcggcccacggtcgttgctgagctgctccctgtgactgttgttgcatgggctcgaactgaccgtactgagacacaaactgaggttgagccagtccccctgactgatattgggcttgcggggaaggatgatgattttgataattcaagttgcccctggtaattatgaaggttcggctgaattttacgtgccaaatgctcgggaacaacttgaggcattactgtgccatccggctgtacatggtgaaccaagtgttctgggacgacttgatttaaaattgttgtacaggctgtccaccaggcgtcacaaacccggccgatacgctcattgagccttggtgctgaatcggctgaacgatttgctgtcttaacgacgtttgctgaatcggccgcggaggctgttgccttggtggcgtttgctggactggttgcacaacttgttgctggattggttgtacaacctgctgactcgggagtgtctgttgaatcggctgctgctgtattggatcaatagcaggttgaggcggcagaaacatggcagcaatctgatcttgcgttggccgattcacaacctgcccactatgctgtggctgctctctcattaacaaccgagggtttaccagctggcctggtgccaatactgacggagtaggtaagggagtcgatgccggctccgtcggctgagctgatggtgcgacggggggaactgcctgaatagatggttgggtattagtgatcaaaggccgataatttggaaagacacctccttgaaaataaactgggcctgcagcctgatgctcaactattgatccatcggctattgacttcatcatgtttgataaggtattgactaacaccctagactgattgatcaaagcatggtgcacagcatagtcgacccggtcttggaaattattgaaaaaatcttgtgccgcatcactattctgattaagatttctcccttgcaacccctgagcaccatcaccttgaactccatgcactccatcgccttgaactccatggaccccttgagagttgtcaccttgacttcctagagaaccgtcggtagcccctttgtcactcagtcgagccgagccatctggagcttgtttcccgtcttcacctttggaagaactggtcccagggtcatcggcaactacctttactttatacttctgaaccaatgttcccttgcgggtctgcatgaatgagttcaagaactgatcccgggcttgctgcaacattgcttcaaaatccttcttctgctcaggtgtgaatttctctggatcgataggcacgacgtttccttcattgatgtcagtcaaccccaacttctggatcttttctttaacagtgcttgggctagccgaggatggcgacagcggtggcttctcggccatgaggaagaattgcttgctgacttctaattggtcccaccaggcgtgccaaaagcgtgttgacagaaaacacgaggcctgggagatctgcttaactccagtgcaggtccaaagctcgccttcgaatgtatgagcgtgccagttgatttgatcctgtaatcaacaagaaatagagacaaagaattcgtggttaaatctataaatgatagtcgatcggtaaggtgctgatgacatatcatttatctttgagccgatgtcatatatgaatcgatcggcggttataaatagatattaaggaactaaatctattcgatcggctgtagatattaacgatatatagttcttatattaatatatacttaaatcaagtgattgggatagatcggtcaccatgccgagacagtataaatcacttagatcgaaatatatattaataacatgattatatatgtttatagcatagccgatcagatagatctagcatgtatcggctaatactccgatactactttatataaagatattaaaacaaatataatataccaaacaaaagcttaatatacttaaatgcaataagatcctgacataaagggcggatttaacatgtcattgaagcatatagatcgaatatggttaaatcagataagatcggctgaaactccgatactaccctaatcggcaaccagaggacaggctagagattgatattctaagcacgacttaatagatcaaactcaactgatgcagtattaagtatgaaaagaagaacaatatctagacaatcaagccgctgggttttcataaagtggtagatatcttatataatctagaacaacatcgctatttaacctaatcggctgtcttctattaacagatgttagccgattgtaggttagatgatgatattgccaaagattatgtaggatatatgataacttgacgaattatatagacaagattagagtgtcataaagatagaatcactaatctcgagaacgtaagtcgtcataacaagttttacctcttgttgaagatcgaaaccgatgcagcttaacccgaaagcaagaactcgtcgaaacaaaactaaagcaaaaaggtggcgatgcgccgaaattgtattgaacgtgtgtgttctttttttaaattacatagggctcggggtctatttatacccgagaattacaagatatgtccataccggacacgaccactatctctaacaaactctagacttttgcccaaacatatctctaaggaagttacataaaacagcataattaatagatacaattgccttctcaggactctatccatgtgcggcaatcatcttgaagcacctcaattcaacccaatatcatacaccaaatcatactgtcagaatcggccgcatcagctcacctagtccgactcagacccagctgatcctaatcgtagccgatctggatttcagccgattcttactctgttctcagatcaatctccgccttcgactccaccttgatctaatctccttttccgatgctgatattaccaaatttggtcgttaacatacgcacataccctcgaatgttagtgagaataggaatataccgttggtttccctttctgtttcgtgttaggaggcatattcgtgggtgtgtaagtgtggtgttgtgtgtgtactagtgtatggtgtatgtacgtgtgcgtctgtctgccatgtaattgaaataaggaaaaaaaaacaattctttgctacataatgatggcgagaaaattgtttgtttgtttttgttttgacaggtgcaaagcacaagagggagtgtggcgagctgaatgcgccgctgccgctgtgcgaccccggcggcgacgcctgcatcgcgtggtgcatcaacgagggctacgccaacggcaagtgcttcgtgtcgaaactagatttcggcaataataaaagggggtggctatcaagctcggaaagtgtatgggtttggagacaaggaatttatacaggttcaggccttcttataaaagaaataataccctattcctgtccgggggatgaatccgccgagtgtattattgattgtatgatttgggaaaaaatcagcatatgcccctagaggcgcccggaccccccttatatatgggaaggagtccggattacaaaagataatctatattcctaacggaacatgaagatacaggtaaaatacagtcgtaaccgactaagtctcagggtgtttccttgatacacaagttaagaaacaaacccaagatacagataagatattctatctacattaagtatccggtacccaatccaaataccgttgccgtgtagatatgggatacccataatctccacagtagcccccgagtcctttgcagtcgaccatcatagtcttctcaaagatagtaatccgagtgcttcaaactcttcaagccaaaacctgccgagtggactgtaaagggcgaaaagataaagaatatggtgcatcgaatagatgcacctaattaggtgtagcccccaactatgtgattagttaacaaactaatcatatagttgaaagacaaaataataacacaattgtgcattatatgacaaaagcatacgcggcgcctaaataggcatgctagccgaccgctttttagccacaataaaagaaatccgagtggattacactctaaaaggttcacgaatgaacacacttgacaggcatccgaatataaaaactctaaagattacccatcaagtattatgaagattatggtaataaataagtcgaatagcctaggccatgactatttaccataatgaaaataggtatatcacataccaaggaagtgactatagtaaaaacaagtcattcctagttaacccaaacagcttttgtagcctaaaaaagcttgcaaaaacagcataacgcctttctgtcgggcacctttttaatttgcattgcaataattccaaagaattatatgaccgcataaaaaggatttgatcagcattgggcaacactgttgtgcgcataatattgccaaagcaaaatatgcctaagtccctaaggaacacaatgggccacgctgttaaaagtattgggctgaagtactgttcaggcctaggcccattagcacctccgatacccttaactgaaaaatccgatatccaagcgacgcttcgtcttccccgccggaactctcgccattttccccactccctgctacagtgtaaagctgcgccggcgaactagggttcacaactccggccaaatccacctccgaaaagtgcatcaaaatccttcccgtgatccaccgcctcaatccctcacctctcccaagccatccctcaaatcaaatcaacacatttgagtgaaaccaatggcggaagagagagaaagcttcgaaggccaatgggcgtcatccgacgtaacagaagagaatcttaaggagatggtggcgcacggcgttctccctgccaaggagatcatcgggtggcgaccagcgcacggtgaggctttcccgtctccggatactcatgagattgtggtcttctcgcatttcttctacggcggctttgctcttccgacctcaaaatttttccgcgggatcttgaatttctatggaatcagcttgcatcacctaaacccgaattccgtagtgcatatcgccaatttcgtccatgcttgtgaagcctttttggggatcaaacctcactttgccctattccgccggatcttcttcctcaagccccaaccaaacaagaacaaaccgtgtgtagtcgggggggcaggattccaactaaggggaactctgagccaaaaatatttctcgatgcccttcaagacttcgaacaaaggctggcatgcaaactggttctatgttcagaatcccgagcctgctcttcccgggtactcttgtcttcctccagtgtaccaagatacttggaactctcttccaatcggagatgaagcagtacaagccttggagttgttggaccgtatgttaaatcttaaagaacaaggtttacagggagagcagatcactcggcacttcatcaaatgccgactggcgccaatcaaggaaagatcccgcacagcattcgagttcgacggcaaacatgatcccaaccgtgaagaaccagactccctggatttcaaaatcatgaaggagaggatgtataaaatcttctcaaatgcaattgtagtcagctactctcatcagctgccagtagtgccatataatgcgttcaatccgcctccgcaggtatgcatctgaaatcctcaatctatggccaaaacataatttcatcttcatgctgagttgactaactatggaagcatcttgtgcaggaatatgcattgatgaagtcagatccaccagtctctcagcgtcggtctcctcgccaacacaccgttcagggaggtggagggccaacgatcagaccagatccgcaacctcagacctccaaattggctggtcaaacaggtcctcgcaagagaaagctggttcttgatgatgatgaaggcgacgatgataaatctggggataagggctcgcctaataaacccccaaagcgtaccatgcccaggaaaaaactggctggccgtgcaatgccaaagatcagaacatcttccaggtattagacctctcgatatgattccgcttcagcatgttatgctcatgaaaatgatgctgaatactgaaagaacactttgcaggaaaccatctgatatagatccatctggaaaagaccccgatcctgccatgacagagcaaaatatatccaaggaccccgagccgactgctgaaaaccagccgactgctgaaagccagccgactggcgcccatgcttcgggcgatagggccaacccaagtgacctgccgccgactggaaaccagtcggcaacaaccgaagcggcaacaactcaagaacccccgactggaaaccagtcggacgcaggccctgatcaagagatccccgaagtagaagcgcagacgacgacttcgcaaggaccagaggctggtaacgactcgatagctgggtcttcaggtaaagaacaaagatcacctcacgctcagctaggtacatcttcaggttagttgtcttctcaaacaatggcgatttaaataacctcagtgtatccgtctaatgtcttggaaacacatcaggaccatcaggtgatgacggagaagaaattcctcgcataaaggcgaccgacgactctcgtcctcctatcttgatcaaatggtgggacgagaactcacaagctgccggcatagtcataaaccgtcaaaaagaagatgaagaagtgtgccagctgaagaaagcgctcggagaagccactcgtattgtaaatgtaagtcttccgagtgacggccttcagtaactttgttttctttttagcagaactgaaccatgatccatcatgcagagaatccatcttcgcaatgaggccaagactacaactttggaaaagctggttcctcatttgggaactctagaagcagttagggaccagctgcatgaggccaaggagtgcgccaaaaagacagagaaagagttaagggaccgaatcgcccagctccaggatgcaaacttcgagctaagtggttcatcaaaaggtaatcatctagatctgttccattgatttatactgtcataattgcatcctcaaatatttggatttcaaacagcgcaagccaccagaatggctcagatggaaaaacagattgaagccttgaaaaaagacaaagcaggactggctgcagaaagggactcagccttgaaagaaattgaaggtactgccggctgatgatctgaactttcctctttttaatgcagtagagtctgattgttataaatgtgttctgtagaccgtaaaatcaagtctcaagctcagtttgacgtcctggttggtaagatcaagaggcttgaaggagcaagagatgaagtcgccaatgtcgctacaccactcatccaagccatgttcctcaataacagtggtccgagtgcactcgacgcaaccgaaatattcgacaagctgagtgttgctccggatgtatatttcaaaaatatcaagaaagctggaagtatgggagctagcatggccttggcgatgacaaaatccttgtacccgagaattgaagttgataccattgatggatttgcagacgggacaagtgaagaagctgctcttgatctcatcaataatgcgcagagtgcggctgacaaaattgcgagtgatgttgtagagcaattccgcaacaacgacctccagccgagcgataataactctgatgatgaaaggactgattctgactgagtgtaaatgtaatacatggaggctcaatttgtacaatactggtgtatttatgctgtgcttgatgattcttgcgaagtttttgatttcttaaaagtttttgctaagctttattgagcctaaaacccaaagaagctattaaaaactttcagtcctcgcaaactaagtagaaaaaccaaacaaggcaatgataaaccaagtaagcaaactgaattgataaaaaatcacactccattattatgatgatagcccccgactggcaacttcaaggagaaaacttgatgtttgacagtcaaaatagggaaatacaatgataaagttaagcgtagaaacgacgaagatgttcaatgttccaagagttgtcgacgagagtgccgtcttcgcgcttgagtcgatatgaacctggccgggtaacttcagagataataaatggcccttcccatagaggagataacttgtgccgatctcgtgtggtttgaattttccgtaaaaccaggtcgccgactaaaaaggcacgagatcgaacattgcgattatgataacgtcgcaacccttgtaagtaccgagctgactgaatcaaagctgcttcgcgggcctcttccagtcggtgcaagtcgtccactcggtcttcttcatagcgttcttcacggaaattacggaagcgcaaagattcgaactcgacttcactcggcaacattgcttctgccccgtagacaaggaaaaaaggtgactggcctgtggcccgactgggcgtagtacgcaaagaccaaagtactgatggtaactgtgacacccatttgccggcatagggtttaagccggtcaaaaactcgagctttaatcccttgaagtatcatgccgttggccctctccacctgtccgttgctcattgggtgtgctactgaagcatagcaaatcttgattccaaagtcttcacaaaagtctttgaaaactccgccggtgaattgtgtgccattatcggtgatgatccgattgggtactccgaatctatgcacaatgttgatgaagaaatcgcgagcattatctgctgtaatcgtgacaacaggcttagcttcgatccacttggaaaatttgtcaatggccacgaagaggtgcgtgtaaccgccgactgcctttttaaacgggccaaccatgtcgagcccccaaaccgcaaacggccaagacagcgggatagtttgcaactcttgagctggtagatgaatttgtctggcaaaaaattggcaaccttcgcatgtgcgcacaattttgtcggcgtcggacactgcagtaggccagaaaaaaccctgccggtaagctttgccaacaatggtgcgcgctgcagcatggtttccgcatatcccagaatgtatgtctttcagcaattgtctcccttcctctaaagatacgcagcgttgcagaattcctgaagggcttttcttgtataactcagattcatgcataacataaagtttgctccgccttgaaatccgctcggcttcatctttatcttgagggagctcttgagaagttaaaaatcgtatgaagggctctcgccagtcggcttcaaccatggcgacatcatgggtgcccgtaacttgagtggcatctttgtgaggtaccgtcggcgtataaaggtgttcgacaaaaacatcagagggcgctgcctcgcgcttggatccaaagttcgcaagtctatcggcagcttcattgttgtgtcgaagaacatggctgagctcaagtccatcgaacttatcctccagtttgcgtacctcttgtcgatatgccatcatgttgtcgtcaatgcaggaccactctttcataacttggttgacaaccagctgtgaatcacctcgaacaattagacgctttatccctagggaaattgcaatccgtagcccatgaaggagcgcttcatactcggcgacgttgtgagacgccgaaaaatgtatccaaagcacataacttagtctttctccagtcggggaaattaaaaccactccagctccagtgcccgaaagtctttttgacccgtcaaaatgcatggtccagtgctctattttctccacgggggtatcctcttggcactcggtccactcggcgacaaaatcagctaacgcttgagacttgattgaagtgcggggcttgaatgatatgtccaaagacatcaactccaaagcccacttagcaatccgcccatttgcttcgcggttgtgcagtacatcgccgagtggaaatgatgtgaccaccgttaccgagtgaccttgaaagtaatgagacagcttcctggtagtaattaaaataccatataacagcttctgaacctgagggtacctcgttttggagtcggccaggacctcgctgatgaagtagattggtcgctgaactttctggacatggccttcttcctcacgctcgacaaccaagactgtgctcacgacctgggaggtggctgatacatacagcaacaacggctcctgcggatgtggtgaggctaagaccggtggcttggtgaggagttgtttgaaatcttcgaaggccttctgtgcttcgggtccccattggaaattatctgttttcttcagtagcttgaagaagggcatcccccgctcgccaagtcttgaaacgaatcggctgagcgccgccatgcatccagtcagcttctgaacatctttctgggtgcttggcggtttcatgttgaggatagcagtaactttctccgggttggcttggatgcccctatgagacaccataaaaccaagcagcttccctgacggtactccgaaggtgcacttttcaggattcaatttcatcctgaaagcacggatgcttgcaaaggtttcttctagatccgagatcaaatcatccttttgcttggtcttgacgactacatcatccacataggcttcaacgttgcggccgatctgcgttgagaagcatctttggatcatacgttgataagttgctcctgcgttttttaatccaaacggcatggtgacgtagcagtatgccccaaagggcgtgatgaatgaagtcttcaagcagtcggattccttcagtcggatctgatgataccccgagtagcaatccagaaaactgagaagctcgcagccggcggttgagtcaactacctggtcaatgcgaggcaacccgaaaggatcttttgggcaagatttgttaaggtcagtgtaatcgacacacatgcgccattgccctgttttcttccgaactagaaccgggtttgccagccagtcgggatgaaggacttctttgatgaagcccgctgctaacagcttggtcaattccaccttgatcgcgtccttcctgtcttgtgcaaatcggcggagtcgttgtttaataggcttggcgtcttctttgacatgtaaggagtgctcaatcacctctctgggaataccgggcatatccgaaggtttccacgcaaagatatctttattattttgaagaaaggtgatgagcgcgctttcctatttacaatctaactcggcgcctattacagcagttttggtaggatcagaaggatctaagggaatctttttagtctcggcttcggtttccccactttttgaaattttggcagcgggcacttctccttcgctcaccgtggttgcagccaatcggatttcctctcgggcagacgccatctcgcgggtttgggccatgtcgcaactctccttgtcgcatgtgacagcttgcttgatgtcgctccgtagggttaggactcctcggggaccaggcatcttcatcatcatgtatgtgtagtgcgggacggccatgaacttggctaacgccgggcgtccgagtatggcatggtatgctgtctcgaaatcggcaacttcaaagctgatattctctgtgcggaagttttcccgagtgccaaaagtgaccgggagagtgatctggccgagtggagttgcggataatcctggaattactccatgaaaaggcgcattgcttggttttaactcggagcgagggatctgcatatcatccaaagtcttggcgaagaggatattgagtgcactgccgccatcaatgagggttctgcgaaacttgacgttacggaccactgggtctagtaccagggggtaccgccccgggtggaccactcggtcaggatgatccgagcggtcaaacttgattgcgatctctgaccatcgaagatactggggcgtgtcaggttgaacagcattgatctcccgttcagtcaacttctgcttccgtttagactcataagccagggggccgccaaagatatggttgagctccttgcggtggtcttgaaatccagccgggatgtcgccgtcgtccttcttccttgacgtgctttgttcctcgtcggagttcttccgagtagacttggtgtactgctccgcgaactgcttgtagatgaagcattctttggccacgtggttggagtttggatgatgcgggcattgggagttcatgatcttgtcgaaggtgttgacgcgcgaacgctgtcgagaagagtgagcggcggttgcaacaagttcctcaggcttacgcttgcggtccttatgattgttacttccacctcctcccgtagccggcgtatttttcggcttccaactgggacccgactgcttcgatgcggtgacggcgtcttcggctttggcgtactcgttggctttttcaaacatgagcttgactgttctgggaggtttgcgcccgaatttgccgaccaactcttcgtggcgaatccctttggtgaatgcggcgatgatgacgtcgtcggtgatgtcggagatcttgttacgttgttcagaaaatcgccggatgtaatctcgaagagattctccggacttctgaatgacgttgtaaagatcatattgtgtgccgggacgctcgaaggtgccttggaagttggcgatgaagtggtcgcgtagttcggcccaagatccaattgtaccacggggcaatccatggagccaagatcgggcggaatccgctaaagccactggtaaatagttcgccatggccttgttgtctcctcctgctgcgcggattgcgagaccgtagacggtaagccacgattctggattagtggtaccgtcgtacttctctattccagtcggtttgaagccggctggccaatccactcgacgcaggtcgtcggtgaaggctgcaactccgtcaaggtcgtcgtcgcggcgatccggcgagtgatggtagcctcgagctgctcggcgctgtgtgattgtgtcgcgaagatcgatggggcggcgacgaggtggtgagcgaggccgttccactcggcgctccccatgaagttcgggaggcgagtgaacagaccgctcgtcgtggcccctgctcctgcgattggatcctgctccagtgatgctgaggcttggatgacggtagtcatgagatcggaagtgggggacccggctgccagtcggcgtgtggacgctttcggagttaactgggaccgtcgccgcaatcatggtcttcgtctggttcaagatgttgacgacgtggtcggaacgattgagctcgttttggttgaggagggtgtcgagaagggtgatcgcggcaaccgcattctgttgaggggtgcggaaaaccagtgtcccttcgacatcttgctgaccgatgagatcacgtgctcggcgccctgcttccaaagctcgctgacgtcgatcctcagcctccttcgcagtccgctcacggtcctgctgctcgcgccgtagccgttcttgttcttgtgcttgatgctcctcctccagtcggcgtcgttcctcggtctcctgggcttggcgttgctcctccgtctcattattggccatgaaaacgccaaagtagagaggggtgtagttgtcatctaggcttccgtcgaagtcgtcgaagtcgttgaagtcgttgtatcgagaactaaattcgtcgtactccacgatgtcagtaggacgtgagtcgacggtgggagagctgttgtagtcatccagctgatctgtcgaaaccgtgccgagtggttggaggatgacgccgacttccctgaagctaggcgaactcggtgttgaagccgacttccgcctaggcctacgggatgaaggcgctgtcgtggtgaagacggccgctaaatcgtcggggagcttcatcaggaccggtgggtaagccccatcatcttgatctggtatcgttggagaagatgcgatctcggccgagtggtttgaagccgactcggttgagatggtcttgaagtagctttcagccgcgttcgggaatccaagcgggaccgaaagccggttctctcccgactggtctgattccgagtcgaggagagaaatcttgccgaagttgttggtgatgaagtcgaggctgccgaaccgaaacgcctgcccgggtgggaagacgaggtcgtcgatgccggagacggaacccattgcactgatcggcgaaaagcttgacgctacccctacctggcgcgccaactgtcgaaactagatttcggcaataataaaagggggtggctatcaagctcggaaagtgtatgggtttggagacaaggaatttatacaggttcaggccttcttataaaagaagtaataccctattcctgtccgggggatgaatccgccgagtgtattattgattgtatgatttgggaaaaaatcagcatatgcccctagaggcgcccggaccccccttatatatgggaaggagtccggattacaaaagataatctatattcctaacggaacatgaagatacaggtaaaatacagtcgtaaccgactaagtctcagggtgtttccttgatacacaagttaagaaacaaacccaagatacagataagatattctatctacattaagtatccggtacccaatccaaataccgttgccgtgtagatatgggatacccataatctccacacttcggcggcgacaccggctgcacctgcctcaggccgtgcccggctccggctgctcagcccacgccggcaacgccacgaaaatgggctgattttcactgaaaatttttctcatcaggctttcagttacgttggtggtatacatgcatatactatcattccttcttacaccaaggaaattcatctttacggtgctctttagtgataatattctattgactattgccagtattatcaccaataaaaatgattcccataattggcttatgagttatgttctgccatttgtacgtattacatccgtgcaaaaatagttctctctaagattgtcacttttgagtattacatgctaagattgtcacttttgagtattacatgtctcatcaatcatcttcattttagttttttttattctaccctcaactatccttgcacatctataaccataccctatttaataaggagcactatagtctttttctttaaaccttaatctaccctaaacaatttagaatgacaactatactacgacggagggagtacatatgattcactagattaaaaaataaataaataactggtctagattaattatactaccacaaaacaaggatatcatttcatttactccattttttttaaaaaaaataaatgcaacagcatggatttgcacataaatgcaagtgtatctctctctacacataaattcggttggaatcaagctatgcacattaattcattgcagatgcaaattaattcctatatatatatgaacgctgcccccatcccatttacatccatcccagaaaattctctacacaaaaattagattaatttgctcttaattcattcctggacttcttgacccccctcaaaaaaaaaaaaaaacctctagttgtcgaacagttcatcatccatggagtttcagagcagcaagatcgcagctgcattcttcgtcttcttcctcctcgccaccggcggcggcgccgccggcgggtgctccgtcggcgagagcagcacgttcagaggcaactgcgagatcgacggcggcggctgcgtggagtcgtgcaggggcgaggggtacaccgacgggtactgcttcaccgaggtcgccaaccctggctaccacgtctgcacctgcacccgcggctgctactcgccggcgcagtcgacgaggaagatgatggcgcgcaattaattagctgatgattgattcgatcggcggcttgtttgaattgaatcgagtttcggtttaataatcaaataagaaattaagaatcaagcagagttcattcgaatgtgacgtagaggggcttgataggaatatacaggtttatgacaggggctattatgaaaaagttccagaactaacgccaagcgacgccaggagaaaattttcttagagacacgctataaaattaaagcagacacccataacacgtgtatagttaccctatgaacgtacgtacacacagccttctcatatgagtatactttcagaacactagaccaatattttttgagattgacgaagtcactacggacgtctcgttgcttaggggtgaaaacggagcggatattatccgctccgctccgaatccgtccgatgtgaggatatggtaagaatctttagatatccggccggatgcggatgcggatgcggattttatcatgcggatgcggatgcggatatggtatcaacgatatccgacggatgcagattatccggtattttaatcggattatccgatgtactgtttagcggataatccgcacctttcaggctatacaacaactctatttagcccattttacatcggacggcccatctagcctatctagtgtaacctaatccaatcctcccctaaatctctctctctatgtgactcttctctcggtcccttctcctgctcccacacgcgccgccgcatggcaccataggtgcgccgcgccaccgttgcagcctgctagcgccaccgtcgccactcctccttctagttcgccgacagtgtgttgtgtgctgtgtgctgtaagcagtgtgctgtatggaactagtgtggtgtgtgccgtatgcagtgtgctactgcgttgtgtggttgtgtgctgtatgcctatattgttgtatgcttcattgcctcatgcctgtcgtactgatgagtgaactactaaactgaacactacatttttaaattttaagcaacgcagtgaactgctgaactgaacacttatattatgtttttgatggatatgttatattaagcaaaattatattattgatgtgttttggttggtttttcatagagagctgagatcatgttcatatgttgtttggccatcgtattgcagctaattgtattgccgccctcttgttgtatggattgaatacaaacttgacatccgacaactttttgtccgtttccgaaccgagtccgcaccgactccacaccgaatccgacgtacgaaataatctgctccgcatccgcacgtcatccgcacccgctccgcatccgcttaaaagaaatggtttaggatatgtgacggagctcgtggctcctcaccgggagaccgcgcaggcccccctttgccggttcggccgggggcttagggtgcaatctcaagctctcgctctctctctgtatgtggaaagatcgtctgccagcaagaaacacgagacaccggcgatctatacaggttcgggccgctgagaagcgtaataccctactcctgtgttttggtggatctgtgtatgaatgagttacaaagtgtgagctgacttctcccccgttctcagcactcaatccgggaaagaatcaaccccctctcaatgggcaaggtcctccttttatacttcaaggggataccacatgcacccttccctttccaaactggactgttctttttctctttaatgggcggagattggtatggctgctgtccgaacgacacttcgatgggacagcccacacctacctccactcccggcggagacgggcgcaacgtgagatcgtggctgcccgttgctgatgcgatcagtgtcagaccggtcattcttgtccaccacgcgtcagtttaataacatgcatgtttccccttcttcgtgtaacacctcgcctgtaatggttaggatgaagcctggtattcatctaaccagggctaacgtgccatctctaagaaataacacgctagctccggcttgagacgagtgcctagaggctttcgtcttgacgggatggggcaaggcgtgcgtcagaccgccagtcgccacctaacccttgatctgaccggtctgtgactggtcacagaccggataaaagagcgtgctgtactgcgatgcacgcaacgtgacacgcttgaccagactgcaatgaatgctgttaggtgagcacagctgtgctcacttatcccatatatgtggcgcagacttctttaaggggtcggggtgccccggccctcggggccggggcaagcgcaacccgaccccccctcgggggaaatcacgaggagggcggacacctcaccctcgggcccgacgtccccgaaggtgccaggccacgtgggcgattgcgtctgcctcaagcctctggtcatgatactcccggtcccatatcaccgacagtagcccccggcgttatgccagagcaatttcccttcccaagggaagcggtcaggtgtgacgccacccctaaagcctggtgacaggtgggaccggtctccgtagttgggcaaaatacccaacagtctcaatccatgcaccttggtactggtaactttggtggtccataatgggcggtctattcaagactgccacaccacttgagcagcgcgcgaatctgggcgagcagatttgtctcgctcggagatacggtaacgccgcttcggtcggcgagcgtaattaacgcgcgcacgatacaatccgtttcgattgccacaaccgcatatccacttcatgcgccgtaagcgggcgaatgggattagtggaagcgtgggcacgggaaactagggagcgagatagcgagatacgagggagcgaagtagtgggcgcgagaaacgaggagccaggcccagcgatggcaagggtataaaagcatcgagaaaaggatttgctcccttcctttcgccattgttcctcttgccttcgccgcctgagctctaactctttctctgctacgccctaccttcgccacacacgctcgttcccaatcatctcttcctccaccgccatggcacggggctctgctctgctcgacggcagtgtactgccgccttcccgcatcgtgaacgagaggcacgccggactgccgcgccgcttcatgccggagtccgccaccggtcgggagatagtgatgctgggcgaggggcgcccggcaccagactacccggggcggtccatcttcttcctccctttcgcaatggctgggctggtcccgccattttctcatttcttcatggatgtcctggagttctacgatctccagatggcgcacctcacccccaatgcggtgatgacattggccatcttcgcacacctgtgcgagatgttcattggggtgcgcccctctcttcagctgttccggtggttcttcaccgtgcagtcggtgtcaccgccgtcggtggttggcggctgctacttccagccgcgggggccggtgttgaaccgctacatcccctgcgtcctccgcaagaattgggacgactggaagagcgactggttctacaccccccttgccgacgaagcgcgtctccgacttccaagccagcccccggcgcaggtctccagctggcgggcgccggtagatctgggggaggagtacgacgccgtcctcgaccgcctggcgggcctgcgatcccaagggctcaccggggccatggtgtacggcgattacctccgtcgccggattgcgccgctccaacggcgcgcccggagcgcctgggagtacactgggcctgaagactacatgcggacccaccagggagccagatgggattgggctcccgaggacttcaagatcgtggtccaaagggtgctgaatcttagctctgcggaggcgtctcgcattcctcaagagatcctccccctctgcagcgatcccgaccgcgcctccattctaaccattatgatgggggtcggggcctcagaggagagagcccctaagggccacgacggcgcgggcgagcgccgccgggggaaacaatctgccccaggagggggtcgtgcttctgggccccgcgtcgggggctcggggagcagccgccctgccgacgcccaggggaaaaggaagctgggaggaacacctcccccatctcctccccgagggggcggggcggcgcgtgccagcagtcggcgcccggagggggccgcgccggcgtcgcagcccgagggggagcgcaagaagaagcggctccgcaagacgggggagacggagccatgccggggaaacctgatttcccctccaaggtggtcattcacccgaccccctcgcaggttcgtctcgctctcttcgcgatcgccttttcttccatcctaaaagcaagttttttcttactcattttgttcgtcttctggttttttcttctgcttcagcaatgtcccgtcgcattcctcccgccaccccaagtccggccagtccgaggccgaagatccggcggctgcagaggagcggaggcgagaatctgaccggcgtgaagccgcagatcgccttcgggaagccgaagaggccgcccgggaggccgcccgggttcgccaagcggaggaagctgctcgggaggaggccgcccgggctcgccaagccgaagaagctgcccgggaggaggccgcccgggctcgccaggctgaggcgacagctgctgctggcgcgtcactcgggcccactccctcgggcggccctcaggcgacatcctccgaggcggctcgcgacgaggccgcgggcgcatcgcctgggcctacctcaccgggcgacgcccaggaccaaacgggcccgggggacatccccgagcccagcgtatcctccggggggccaagccgtgtcacattttctccaaggcggcttttctcctcctcttccgtcgccccggtgagcgccgagcccattatgcaggccttggccgccgcaaacaccgcggtgctagatggatttagcgcccaggtggaggccttgcgagcggaacgagcggagctcgaggccgcatgggcgcgcgtcgaggaggggcggcgctcggtggacgccatggtggaggtgggccgtaaggctcaccgccgccacatctcggagctcgaagcccgcaaggcggcgctggcggagatcgcccgagaggtggaggaggagcgagaggccgccctcgtcgccaccaccgcgatgatcgaggcgcaggactccctccgccttcaacacgggagctgggaggcggagctgaagaacaagctcgacgccgcccaaggggttcttgactccgctgctgcccgagagcggcgggcaacggaagccgaagcggcgtcccggcggcgcgaggaggcccttgaggcccgtgccatggcgctggaagaacacgccggcaccgtggagacgggcttcatggaccgcgaggccgccactgctctccgggagacgacgctggcggcgcacgaggccgcctgcgccgaggaggagtccgcgctccgccttcgcgaggatgcactcgctgagcgggagcgagctctcgaggaggccgaggccacgacgcaacagctggcgaacagcctctccctccgcgaggcggcgcaagaggagcaggcgcgccgcaaccttgaatgcgtccgtgccgagagagccgcgctggagcagcgggctgccaacctcgaggcacgggagaaagagctggccgcgagggcgcgcatcggcggggcggctgcgggcggaagcgacttagccgctcgcctcgcggctgccgaacacaccgtcgctgacatgcagcgcgcgctggattcttccattggggaggccgaggccctccgcttggcgggcgagatggggcccgacatgctttgggactcagtctcccgcatggatcgcgccggtcggcaagcgggcctctggaaaggccagacgaggacgcgccctagcaacctggaaggcctcgctccgcacctcaacaggatggcctgggtcctcgaacgactccccgaggagctcgagaagaccatcaagtcatcctcgagggacctcgcccggggggcggtcgaactcgtgctggcgagctaccaggcccgggaccccgacttctctccctggatggcgctggaggagttccctcccgggaccgaggacgacgcgcgcgcgcgcgtccgggatgctgccgaccatatcgtcgacggcttcgaggggtcggcccctctgctcgcgttcgcccccagctccgacgaggagggcgacgccagtgatgaggatgacggcggcgacgaggccggcgacccgggcgcattggaatgagcccccaggcccccgccaatcttttttttcttgttctttcttctaaggccttcatgcctcttttttgtacaaattaacttaatctgcaatcagaagaaaaaatttttgtgttagttttagtttgctatgcaatgagctgaggatgatctgtgccgtgatcctcttttcgtgtcttagcctgatttaagggcccgtgcccaagtcctaatcctcgaagggcgcgggtcggggctagtgcctggggagatccgcatgtcgagactggccaggccgggaacgtggtgaccgagggttatgggtgacccgattgtgggtttttgccgattcccccccggagttcaccacgccccggggcacggctcggttctgggccccgcttggcgattttagctgaccgaaccgagcccccgagggcaaggttgagcacgagtgaccttatttcaagttaagattcttcagaaggaaaaacggcacagacacaacctttaggaatttgaaactgcttttattgaaatgctgaaaggaatatatgtgcatgtgtggtagcccccggctaaccctgcacacccgaggggggtgcggggttagcccgagccaaaacctgacacccgaccccccccttcaggggtagaagcgacgaaggtgttcgatgttccacgggtttggcagctccgtgccgtcgcccgtggccagccgtaccgagcccggccgggggacaccgatcactcgatacggaccctcccacatcggtgagagcttgctcaatccagcacgcgtttggacgcggcgtaggacgaggtcgtcgacgcagagtgatcgggcccggacgtggcgctgatggtagcgccgcaggctctgctggtagcgcgcggctcggagggccgcgcgccgccttcgctcttccaagtagtcgaggtcatctctacgaagctgatcttgatcagcctcgcagtacatggtggcccgaggagacctcagggtgagctcggatgggagaaccgcttctgcgccgtagacgaggaagaaaggcgtttccccggtcgctcggcttggtgtggttcggttcgcccagagcaccgctggcaactcctcgatccatgaatcgccgtgcttcttgagaatgttgaaggtcttggttttgaggcctttaaggatttctgcattggcgcgctccacttggccattgcttctggggtgggcaggtgaggcgaagcagagcttgatgcccatgtcttcgcagtagtcgccgaagagttcactagtgaattgggtgccattatccgtaataatacggttaggcactccaaaacgggccgtgatgcccttaataaatttaagagcagagtgcttatcgatcttgacaaccggataagcctcgggccacttagtgaacttgtcgatcgcaacatacagatactcaaacccgcccggggcccgtttgaacggtcccaggatatcaagcccccagacagcaaatggccatgacagtggtatgatctgcagggcctgggccggctggtggatttgcttggcgtggaactgacacgctctgcatcgccggaccagatcgaccgcgtcattgagagccgtcggccaataaaatccttgacgaaaggccttgccaaccagggtacgcgaggcggaatgggctccgcactcgccctcatggatgtcagcaagaagctcaacgccttgttcctgaggaatgcacttcaggaggattccgttagccgcgcgccgatagagggtcccttctaccagcacatagcgtttggaaatgcgttgtacgcgttcactcccttcgcagtcctcaggtagagtcttatctgtgaggtatgtttggatctcagagatccaagcaatcaatctaagggagcttggagcgctctcttcgggtcccgaggcctggactccgacgggcctcgggggccggtcaggcgcatccgtctcccctaaggggtcgggtcgcgccgacggctgggtaagcctttcttcaaaggcgcccggtggggtctgggctcgcgaggacgcgagccgtgagagttcgtcggctatcatgttatcccttctgggtacatgccgaagttctatcccatcgaaatggcgctccatacgccgcacttggcgtacgtaggcgtccatctgcgggtcagagcaccggtactccttacagacttggttaataaccagctgagagtcgcctaacaccaggaggcggcggatccccagcccagctgccaccctgagtccggcaaggagtccctcgtactctgccatattattggtcgctcgaaagtcgagacggaccaggtatctgaggacgtctccgtttggggaggtcaacgtgacccccgcaccggcgccctggagagacagagaaccgtcgaactgcatcacccagtgggcggtgtgaggcagctgagaggggttcgtgctggcctcgggtattgagacggtctctggagccggggtccactctgccacaaaatcagcgagggcctggctcttgatagcgtggcgtggttcaaagtgcagatcgaactcagaaagctcgattgcccattttaccactcgtcctgtaccctctcgattatgcaagatttgcccgagggggtaagacgtaaccacagtgacccgatgcgcctggaaataatggcgcagtttcctcgaggccatcagaatagcataaagcatcttctgggcctgtgggtatcgggtcttggcgtcccggagggcctcactaacaaagtaaacaggccgctgcacctttcggcggggccgatcctcttcgctaggggccgtatccccggggtgctcttcgtccaagtggcccctcggggcacactcgtcttctgtgctgatgacctcggggtcggaggacgacaggagcggccttcccacagtggcctcggggccgtcctgggggtcgggggctcctggcgtcgtcagacaagcgagcaaagggccagctccggtcgtcaggggcctcaggcctcctttcggctcgggggcctcttctccctgctctctcccgggtcgagtcagcacagggttagcctcggggtcaaagggcggtaagtgcggccttcccttagtggcctcggggccttcctgagggtcgggggcacccagcaccgtttgacaagcgggcagagggccgactccggtcgtcgggggccttaggctaccgttcgactcgggggcctctcctccctgcctgctcccgggccgagtcggcacggagtaggggtgcgcaggatgaggattgtcctcatcgcgctccacaactaacgccgcactaaccacttggggggtcgccgctaagtaaagtagcagggactcatttggctccggggcgactagaaccggaggagagctgagatacgccttcaactgggcgagggcattttcagcttcctccgtccaagtgaacggccccgagcgcttgaggagcttaaacaagggtagcgccttctctcccagccttgatatgaaacgacttagggcggccatgcaaccagtgacgcattgcacatccctaagtttgctaggggggcgcatccgctcgatagctcgaatcttctcggggttggcctcaatgcctcgggcagagaccaagaacccgagaagcttgcccgcaggtacaccaaacacgcacttatcggggttcagttttatgcgggcggagcggaggttctcaaaagtttccgctagatctgagagtaaggtctcttggttgcgcgtttttacaaccaagtcatcgacatacgcctcaacattacgtcctatttggctacccaaagaaattcgagtagtacgctgaaaagtaggacctgcattctttaacccgaagggcattgatgtataacaataggttcctacgggggtaatgaacgcagttttttcctcatcctccctagccatgcgaatctgatggtaaccagagtatgcatctagaaaacacaaaaggtcgcaccccgcagtggagtcgacgatctgatctatgcgaggcagggggtaaggatccttaggacatgccttgttaaggtcggtgtagtcgatgcacatccgaagcttgccgttcgccttgggaacgaccaccgggttcgccagccactccggatggatgacctcacggatgaacccggcctctaaaagtctagccacctcctcgcggatgaaggcttgacgttccggggcttgccgccgcactttctgccggaccggccttgcgcccggccgcacggcgagacggtgctcaatcacctccctggggaccccgggcatgtccgctggtctccatgcgaagacgtcagcgtttgcccgcaggaaggagacgagcgcgtcttcctatttgccatccagaagaccaccgatccgtgtggtcttggatgggccgtcgcccaaggcaacctccttgaccgggacctcgtcgcatgtggccatccgctgcctcggggcggtgggggcagaggggccgagcctctcgtcaccaccctcgggcttggacgcagcagcgaggcggtccgcgcgctgctccatgcaagcaagcgcgactttaaggtcgccacggacagagatggggccaccggggcccggcatcttcatctggaggtaggcgtagtggaccgccgccatgaacttcaccaacgcgggtctccccaggaccgcgttgtagggcagactgaggttcgccacatcgaagctcacccgctccgtgcggaagttggcgggtccaccgaaggtgaccggtaggtcgatgtgacctaatggccacgtgtgccccggcgtcacaccgatgatcggttgagacggctggagcaccatccccggggccttgatagcatcaaaggccgcgggggaaaggatgttgagagccgctcctccatctatgaggacacgtcccaacttcacgttgcagatggtgggggaaaccaccatcgcaacctgccctccccgggcaatgcacggtgggtggtcggtctggtcgaaagtgagagcaacctccgaccaccgcgcccgacgcatcgcctcatgggtaggggccatggccagaagctctcgcttcatagccttgaagctccggcgagagatgtgagcacatgctcctccatcgacggtggcaatggtggccccaggttcttggaaacctaggtcatcattaccatcatcgatgtcaacagcgggggccttctgcttggcctcacttcgccgtttgccggaaggaaccgccggggacttgccctcacggcgttcctgcctcctgtcctcctcccacttcctcgttcgctcagccaggtttttgactgcacgacagtccgcgagatcgtggagggaggtgttgtggacggagcaccacttgccggcggggcgctccctgctgggagtaccagcctctttctttttgtcgctcgcaggcctcccctttcgggtggcccgcagagcgccctcgacggcgaggacatgaccctcgtcgccggaacggtccgacctcttcttcctcctcctgtcacgccgccctgtctgagcggcggatccgggggcggccgaagctgccactccggaaccggaagagttccatgtccacgcttcctccttacgagccactcggtccgcgagctgaaaaagctccgcggtagtctggggctctttggaggcaatcttttcgagcatgcggttgtgccgcacaccccccctgaacgcgtagatcaccgcgtgtgcagggatgcatggtatagtattgcggacttggcaaaaccgctgaatgtacgagcgaagcgactcatcatcgcctcgctgtactgcatgcaagtccgcttcttcgcctgggcgcggatatgtgccttggaagttcatggtgaactgttggcacaaatcttcccaggagtggaccgatgcgggtggcaggttcattagccaaccccgcgcctgtccttttagggccatgggaaagaagttcgccatgaccctgtcgtcacccccagcggcctcgatcccggtcgtatagacctggagaaactcggtggggttgacgctcccatcgtacttctcggtgatggtgggccggaaccttgggggccaacggacattccgaagactcgccacaaaggctctacagccgacaccacctgccgggggcacggagggctgatcttcacgtccgtgtcgaggtgacactctggacgaggaggcgccctccgtttcacggggagtacgccggctattacgccggcgctcgacgttgaggcgggcatccggctccccatgctgatcctcccgagtcgacggtgtcgacgagggagtggcagccgaatgacgtgcagccgccgccgctcgccgcgccctccgccttgatgacacggagccggtggtagcggcgccggaggtcttggtggtggcggaccgtccaccagcacccaggcgctgctgtgccgtcatgaccaagttggccacgtcttccagccatcgttgggctggagactccgggtcatggacgacaggcgggtgtcgtaggagcgcgccagcagcctgaagcgcaccctgaggcgtgctgccgtcgccgtagacgaggaggcgacgctccccatctcgccgttctcctgcatcaccagcgactggtgatgccacggatttgtcgaccctctcaagcgcctccccctgcttagggctttggcgcggaggaggtggtggagtacgagctcgacggcgtggattcggctccccgtcgtcgccgctcacacttggagagaggtcgtgcgcttttccttgctcggccattaggctgaacaagaaaaacttggcgcacacggaagagtctgagagctcagaaaacacacgctgagccccctacctggcgcgccagatgacggagctcgtggctcctcaccgggagaccgcgcaggcccccctttgccggttcggccgggggcttagggtgcaatctcaagctctcgctctctctctgtatgtggaaagatcgtctgccagcaagaaacacgagacaccggcgatctatacaggttcgggccgctgagaagcgtaataccctactcctgtgttttggtggatctgtgtatgaatgagttacaaagtgtgagctgacttctcccccgttctcagcactcaatccgggaaagaatcaaccccctctcaatgggcaaggtcctccttttatacttcaaggggataccacatgcacccttccctttccaaactggactgttctttttctctttaatgggcggagattggtatggctgctgtccgaacgacacttcgatgggacagcccacacctacctccactcccggcggagacgggcgcaacgtgagatcgtggctgcccgttgctgatgcgatcagtgtcagaccggtcattcttgtccaccacgcgtcagtttaataacatgcatgtttccccttcttcgtgtaacacctcgcctgtaatggttaggatgaagcctggtattcatctaaccagggctaacgtgccatctctaagaaataacacgctagctccggcttgagacgagtgcctagaggctttcatcttgacgggatggggcaaggcgtgcgtcagaccgccagtcgccacctaacccttgatctgaccggtctgtgactggtcacagaccggataaaagagcgtgctgtactgcgatgcacgcaacgtgacacgcttgaccagactgcaatgaatgctgttaggtgagcacagctgtgctcacttatcccatatatgtggcgcagacttctttaaggggtcggggtgccccggccctcggggccggggcaagcgcaacccgaccccccctcgggggaaatcacgaggagggcggacacctcaccctcgggcccgacgtccccgaaggtgccaggccacgtgggcgattgcgtctgcctcaagcctctggtcatgatactcccggtcccatatcaccgacaatatggtatagctattatccgtccgaatccgctccgttttcacccctatcgttgctgataggtacgtcatctaccactaaaagattaattagccgtatatacgagcacccatgttaaatctaagatttgaaaggaacgcatatacgcacactctatccctatgagcaccttcagaagactggactaatgtttcttgagattgacgaagtcatcacggacgcctcgctatcgataggtagatcaccgaccactaaaagaataattaaccgtgaatacgagcacctatgtcaaattaggatttgaaaagaacgcacatatcctattcctatgagcaccttcgaaagactggactgacatttctaaagattaacgaagtcaccatagatgcctcgctgtcgataggtacgtcacctaccactgaaagaattataagccataaatacgagcacccatgccaaatccaggatttgaaaaaaataattacctgtaaatgcgagcacccatgttaaatttaggatttgaagccggatgggttggtttcattataagtaatctaaccaatcgagttacgctcactttgcatgccagcagaaaattgtttgaggatcaaggtgttattcgtaaaattgctgacgatctaaaataggagggccactgtgaaaagttctctagaatttcacccgttagatctcagaggaagatccctagccgttggatcaagattatccgatctctctttcttccccctcgattcatcgccgccgcgccgcctcgccggccgacgacatccccggcgagatccgccgccgccaccctactctcctcctccggattcggcgccccgccggccgccgaggcctcctccaaacccttaccctccgcgcggcgccgcatccttctctctcctagttcgcgcggcgacgatggcttgcgtggcacacgaggaatccattgatgggtagatgaaatcagcaaatgcatatttacccctgatgaagtgagctactctactaacttgtcgtaatttttttgttgctgttgttgttgctaagtaggagtaaaacttatttttgctaagcatgctgggatgagtttgtgacattttcggttggttttgccactgagaatatatcattgattctttgtgcttgagagaaacaaatatatgtagaaataaacattgcatgcaaagatgaattgaaacgagacaaactcttgtaaattgtagctgcttttcattgaacctctctgcttcaatgaatgaacttaattagtctcttgtatttatctttttttttcgaggggataggcagggagctcctgcaattcactatagaagaagagagagttgatccagtttataagggaaaaccggacccaaaaaccttacaacaccacggttaattaaaggaaaaccggcaaaaacctcgacattgacaaactgaacctaagtacagctatccaataagagataaactcctagaacgaagccttcaagaaggtcacgccgacagaacggcgacatcgtccgatcctaacgaatctaggtttttacccggagaaaactcttgaagtggagttgaacgagggctccagtagcaacgccttcaagaaggtgaacggcgcccaagggcgtcgccgttgctagcaccgagagcggagcaagactttcgccttgaagcagccatcaaccatagcatccacgacgggagccaccaaatgtcacctgcacaccgagggtacctgcaatatgcacaccacctgcacgacagccggatgccaaaccaccccatccccactcgaggatgcgccggatctgggcaagggagccagatccggccgtccccctcaccaccaacgccggccgacgcctagaggggcgccggaggacgccagtggccgccgcggggtgcctgcgtgctcacgccaccgccgggcgccgcgccgccgccggatccgcggcctccaccaccgccgtcccaatgccgtcgccacccacatcaccacccggcgcactcacctcagccgccaccgtcgcccgtccccgccgccgtcatcgaccccgccgctgccgccgccgaccccaccgccgaccccgccaccagcccatccccgggcggctccccaggccgtccaagcgcgaggagacgaggagcgccctgccgccgccgtccttgcggccgcgcggcctcgccggcggccgctccggcgacagcgaggcggagaaggggggtggggtggggggaagaggggtggccgggtcgcctcccgagccgcccctggggagagccgactctgggggagatctcttgtatttatctccatctgctgtaaaaagatatccatttgctgatatcctctctggttcacagaaaatagaaatgtccttggtggttggtgctctttggcctcctatatatacgcactctacacaagcaaattccttcatgcaaaccaaaaatagtagccaaaaatgcgcattcgatgagatgaatgcgcgcctctaaatttggttcagcatatataaacctttctcttcgatgccatttttaaacaattccatgccttgtttccatttctaaaagagaaacgaaacagtttcccttcttttttccccttctggttggttctcccttagttgatgccaaaccataacttctttccaactttaacaataaactcctccacgccttattttccgataaatgtttcaccttacttgtcctataaattggcatgccaacctaccctaagattctttctaaatcttatagcaaccggcatataggtttcggcatggtttgcaaggttacctccatattttcgtctatcttaatttattcactcctcaccgtgtcttgcggtaattgcagatatatgctcctctttgctgatgattataaatatttaggataaatttctccatatgcttctctgccttgatcacgtaattttttgtttgtttgtttgtttgaacagatgcagataatgccccggacacaacctgcgaaagtcctcaagcctgtgctaatcagtgtgttgccaatggctacctgatcggattctgcgagatctttactttgggacttggggattgcgtgtgcgtgaaatgcccaaatgcccagatgatgcatgctgaccatcttccattgcagagtcgcttccaatagagcaaatactactaaaaacttattgattgtgcaccttacggcagtgctaggggatgtaaaatatttccatcatttaaaagaaacagagcgatcacttttcgtatatgcgtatatgatgaacaccaccataaatgggaataaactggtgattgttgatagctgagttttggtaaatcaagtgttgagaagtaatggatatgtaaataaagcagcttggaaaatcagcagtgtgcaacttcggcagaagaaatgcttttggtggtttgagctccgagaatcagattgctcaaactgatcagtgaggattatatgttttttttttctcaggatgattgcgcctcacatttcaggtaactttgtcaatcagaaactattgcaatacttattcaattctaggactgaaaaacaaaaaaaaaacatatgctttctctgatatcaaaataaaaatgtatgagcatttattattctttcagagtgactgaaccaggatgtctgcattttgtactttccctgagatactaccaattagtgcaacacactgatgcagactagcatacacatatacaaacatgccatcaagcacacactgtataaagagccatctggaccctcacccaacaaaattcagttcatttcaggtcactgttgattctgccatggaggccaaaattggagccacagccatggtcctgctcctcctggcctttggtgagttcctcactgacaaaatgtaaagcagaaatctttactagttagtagcactaatcagacaccgaactggttacaatggtagcttcataccgacttgttgatgtgagcaggtgttgttggtgaggccaagacacatgaataccgcagccataccttcaaaggcgtctgcatccacgacgatctctggaagtactgcgtcagggtgagatctaggtacgatggatcatcaccggtgagatcctgatggtcgattggtcactgaagacgccggcagaaggagatataactatgtactccctccgtcccataatataagggattttgactttttgcttgcattatttgaccactcgtcttatttaaaaaatttgtacaaatataaaaaacgaaaagttgtacttaaagtactttagataataaagtaagtcacaaatagaataaataataatttcaaatttttttgaataaaataaattgtcaaacagtaaaaaaaaaagtcaaaaccccttatattatgggatggagggagtatacttgatggcagtacggctgatcaagatattagggatggattggaaagaataattagtgttgaagcatggtgtaagttaagtttttcagttgaatgaaaaagatgaaaggggaaatgcaaagaacaccatcaccgtggttgaaagattgggtgttactagtttactagtgagttttgatgcattttttactcaattacggttatcatgagcacaattttagtaacattgcacctgtgtcgcggcaaagttcagaagcactgggtagatgtatatatgggatcacgcttgtaaaaatttccagaatcgtaatgtgatagttttttgtttcaatcgatatatcaccttttgtttccgcgaggatatgctacctttttttaccaacaacatggttaatgtgctgatgaacggtttggccttctcttccaatggctatattgttgaccattaacattactcattataaccgggacacaattaagggccctttgaattggaggaaaaatataggaattttagaggattttaatcctataagaaaatttcctatgatgccctttgaaacaaaggattgaatcctatccaattctttgaaattactatggaatagacattcctatagagattttgaaggaaatttagcaagagctttaacctcttggtaacttttatttgaatctatctctctcatccaatttctgcgtttttcctgcggttgaatcaaacggtcattcctgtgtttttcctgtgttttgcaatcatctgttttacacttacattcctgttgaaatcctacgtttttcctattcctacattttctcaatcctgcgattcaaaggggccctaagtcttggtaccctaggaattggagaaactttaaccaaaattatatgaaatggctacacaaattatattacaaatgctagtactaaatactactagtatactgtaacctccaaaaaaagaagatatacatgacatgtcaaataaaatatatgcacatttatttttataatgcctaggaacaagatgtgggcattaatatgtgttgaattgagaagcatccaaaaacaaggtatccatatctgattatttttcaaggtggcaattaatgcaaacaatccttattctacatacaaattaattaaacatgctcaactctgcactgtataaattaaccatctccactcttctctactccatcaaccagcaaaagtcagttcaattcagttcatcttatctgccatgaaggccaaggttgcagcaacagccctgttcctgctccttctgacctttggtgagtctgatcaactacttcctccgtttcatattataagttatttgacttttttcttagttaaacttttttaaaatttaattaagtttgtagaaaaatataataacattttcaatacaaaacaaacaattatcaaaatttaaatgttagttttaatgaaagtaatttgatattatagatgttactagtttttcctataatttgatcaaacctaaagaactttaactaagaaaaaagttaaatgatttataatatgagatggagtattaaacaaagacatttactaacctaatcatgtttcatttgttgagtacttgtcttctgaattttgattaatttatatattatcaggtggtgaggccaagatatgccatgatcccagccaaaccttcaaggggatgtgcctcagtaacagcaactgcatctccagctgcatctccgaggactagaccggcggctactgcggcggcgtcatagaccgcaagtgcatgtgcaccaaggagtgcgacgacgcgccgccgccgctgccgtcgctgccggcgccgaagagcgggcggcggcgtccgccgccacgggcgccgggggtgacgacgacgatcgaatgaggactgaagagaggctgtgttgtgtgtggtgtgtggtggctattctgattcatgttcaatttaattttcgatcggtcgaagataattaagataatggaattcaaataatggttaataagattgagtgattgaatacctggtgcaatccactgtcatgtttctacttgcaagtagctatgtgtccacgtgtaacacacatttggctgtgtacatccgattggatgtagaggctgggtttatcccattttctaaaaaatgtgtaacacgcatggtgtgatggtgctaagatgaattaaactggatgttttcactgatgataatccaatgcaaaaactaaaggaaaaatttcaaatacgatacccaaagtttgtggtttttaccgtggaaaaaaaacacaactattggacaccctgaaaaactagcaattagctgtgagtcaccctgactatagggcgacgatgactagctacaagcaaagaattaaactgaaaaaattcaaaaaagagagaaaataattaaactgaatttttcatgcaatgagaaaatttatatgcatgagacgtgcctgttgatgtatatgaattgaaacacagaaaaattcaagatatatacgaacaatccatatttctccttttactttccatgacaaaatgacagtgatatataaatatcctattctcatgttaaatcaacaaaataaaatatacctttatgttcgtgtgaggttttcaatcaattttagacaaaacctgcaagctttaaagttcctttaatttaaacctacaagtcacaaagtataccatcacaacttgtggactgagctatttcttgcggtggttcaaattcttagcttgcaacgatgctcgtattttggaggatttaatctcaggaattactacatacacacagaaaggtgtgttcaacaataatcttatgtagacgtgtggactatacatgaaacggatcgaagtaccgtgacaagttgctaattatgatgctcaattgttaaagatttcttggacataggaaaaccttaaccaagaaactagcacgtttattttaaaacattcctacaaaaatcacatccaaattcgtagagcatcaaggcaagttaaagcatattatttttgggcaattttgttgttacccctaatttgatttccaatattgattttatccctattttttaggttttcaattttgctcctgttttttttaaaacgaagctaagttttacccttactttggatggacatgttaacggtgttaaaactttaacgaaaagaaatccatacttttacttgcttgcacatttgacactatttttattcatcaattgtgcccccatttgtacatgcggctcgcagttttgataagcttttacaactatttttttgttggagtaaattacactagcggtccttaaacttgtaacgaagtttcacttaggtctacgaacttgcaaaacacgcatcaaaatccttaaacttggtttagtgtatcattccggtccaaagcctagtttgatcgtggtcttgcctatgtggcatgctacgtggacgatgacatggctaaattttcttttcccctttttttctccccatcttttctcttcttcctcacctcgggtgaagaaaaatgcggcagaagggagaggaaggaggcaaagtggagaaaaaaaaggataagaagggagaaaagaaagaagaagggagaaaaaaataaaaaaaatccatgtcatcgtccacgtagcatgccagtagacaagaccgcgatcaaatgaggatttggaccaagatgatacattaaaccaagtttagggatctcaatgcgcgttttgcaagttcgtggacctaagtgaaacttcgttacaagtttaagtactgctagtgtaatttactctttttgttggctttttccagactataggaaaaaataacaaacaacgaagggtaaaaaatctccgaaaacatgatatgccatatcaaataaaatatatccacatttatgttttcagggctgcatgagttgtgtgaattaaattttgccatttctgcaagtatccaaaattaaagtatgcatatccattttggatgcagggtggccattaataactaatgcaacatcacttgggtgcactcacatttatcaaacatgctatacctctacagtacaaatagccatccatccttctcctcatccaacacatccaattcagctcatggaggcaaaggttgcaaccactgtgttagtcttgctcctcctcacccttggtgagttcactatctactactctctccatcaaaaaaaaaaaatactcgacctagacgggaatgtgacctttcctgtacaacgaatatggacacatctatccagattcgttgagttaggaaatatcacatccccatctagattaagttttgttgggacggcggaagtatacaacacctttatcattgccgatacataaccaacatggctgccaactacagattaaaattggtgtgactaaacagacaatgatactgctaataattaagtatagctataaaattctcataatcatcggcaacctcatatgttgtataatgctacttccaccgattaagcatcatcatcaattgatttatatttgttatttgtgatgagtataggtggtgaggtggctgctgccaagatgtgccatgatcgtagccaaaccttcaaagggatgtgcttccggacctccaactgcaacaccagctgcaccaacgagggctacaccggcggccactgcacaaccttcagacgtcgatgcgtgtgcaccaaggagtgtggaggggacagcccgccgggtgatccgccgccggcgagggcctgatcggggccggagaggatggccggcaatgtggtttctttgattagattgtgtgttacagtgttagtcgtttgtggcagtatggatggaagtcgaataacggattggaaagaacatagttgatgctaatgtgtgcttgcatgtctctttttcaaggtgagaattcatgtaaagaactttaacttttattcgacaataaaaacatccccgatgtgatcacctggaccagaactgaagccggtatcttcaccaccaaaagtgcttataatgcacaattcctgggttcctgctcaaagcctgaatttgacgccatttggaaatcaacagctcagcctaaacagattttccttggatggttaattctccaccagaaaaccctcacagctgaaaatctccttatcaggcattggccatgcgattggatctcatttgttctttgtgcaggcaggcgttcgaagatgctgatcacctcttcagagattacctcttcacgagattggtctggacaagagtggtggagatgagagcaccagatttgcagccccctccaaataacctagccacctgggtccagcatttgcagactgttggagacaaaagactacgaaaaagagaaacctaagtttgctgctcacatcttggtggcacatctggctgcaaaagaatgcaagaattttcaatagtacgacgttaaacccatatcaagtagcaaatctaattgttgaagacatggattttagagaattcacttttaaacctccataagctacctatgtaatctcttgtaataaacctccctctggggaggacaaactctatgctttcctttgttttactcctaatataatcagcagagctcatgctgttttcagcttaaaaaaataaattaattaattaaacatgctcaattctacactactccctccgtaaaaaaaacaacctaagatgattaataagacaatggaattcaaacaatgattaatggggtttgagtgatagaatacttggtgcaatccattatctttattgctagctttgcttagtagtagttagtagccatatgtgcctacgtgtaacttgcatggtttgacggtgctaagatatttggtgatgtatatatatgaattggttcacgaaagtttcaagatatatataaacaaatcctattaggcttttacttatgtatgacaaacatgacaatctcctttgaaaaaaaatggcactgatataaataatccttattctcatgtgaaatgaaaaaaaaaatgctgcctttaggttcgagtaaagttttcagacaatttgcaaactttcaagtaattaatacctttaatcctaaaagttacaaaatattgttgcaagttgtgagctgaattatctcttgtgatgaaactactcactcgagttcaaattctaccactagtacagatccttccatctgtgacggcccataacaagactggaatttacgggccgtcacaaggaagtaatgtcaatcgggccgaagtttcgcccgattgagatatggtcgcacagctatggtatatcggcataaaactaaagcccgtcacggatgacacttatctgtgacgggctatagttgaggcccgattgagatgagggttccatatctcaatcgggccctaaaagaagcccgtcacagatgagggtcatctgtgacgggctccaactagaggcccgattgagataagtttattgcccgtcacagatgacactcttttttgacggccttttattaaggcccgatagagattacttgtatgcccgtcacggttgattgttttagggccgttacagatatttgttgcacagtataaataccccccaccacctagtgtaactatatcccactgttcactattttggtgggaggctgtagggggcgattttttgtcctttttccaaggaaaacagaaattaaattcccaaaagtgatcaaaatggatcaatcaagtgagtaatataaatcattaattgagcaatttcatcacgtcttacttttgcaatactgatcttataatatgtgcctctaatttgttttttttagcaattgatcgaagttggatgtatgccaaaaatttgaaacgtcattctacggagtaccgaaagggtgtaataaattttatgaacgccacggaggaggatcgaatatgaagaaacagtgattacatgtgttgtccatgtgcagattgcaagaacgagaatatgtttgatagcggagaggacgtacacggtcatctgatacaacgaggattcatggaaggctatacatgttgggtgaagcatggaaagcaagaatcaggaagtggagcagcagcagacagaagtggtgcgcataatcaggaagatgaaaatgagcatgacatgtttataccttctccattgggcggtgaaatggttgatgtggatcacgatctgctgcaagacatgttacgtgacgttgaggacccagcccagaatgagagagatggaatgaaattcagcaggttggtaagtgattccgaaacgcctttgtacgctggatgcaaagcaaaacacactaagttgtcagttaccttggacctaatgaagctgaaggcaagtagtggatggacagacaagagtttcacagatcttttaggaattttgaaggctatgcttcctattgagaacacattgcctgagacgacatacgaagcaaagcaggttctgtgtccactgggttagaggtccgtagaattcacgcttgtcccaacgactacatattataccacaagcaatatgcggacttggatgcttgtcctgtctgcaaggcttctcgatacaagcgaaagaaaagtgctgacgaaggaaataagtcaaagaggggtggtccggcaaagattgtgtggtatctacctatcattgatcgtttcaagagaatctttgccaacccaaacgaagcgaagttagtacgttggcatgccacggaaagaaggaatgatggtatgcttagacacccagcggattcgattgaatggaggaatatagatcgaaaacacaaagactttgctgccgaccctagaaacatgaggatatgtctttgtacggatggcatgaatcctttcggtgtcatgagtagtactcacagcacttggctagttcttattgcgaattataacctcccgcgcgccatggttatgctttaaacggaaatatattatgttgtgcttgttaatccaaggtccaaggcaacccggcaatgatatcgatgtattcctggagcctgttatcgacgatctggagattctttggaaagaaggtgtggaaacttgggatgcatatggtcaggagaacttcaagctaagagttctattgttctgcaccattaatgactaccctgcactcggtaatctttccgaacaaactataaaaggaaagaaggcatgctccgattgcaaggaacatacacgaagccggtggctgaagaaatcatgaaagatggtatacatgggtcaccggaggtggctcccgctacgtcacacatttagaagaaagaagaaaatttttaatggtaagagagaacttcagcctgctcccaaagatttgtccggagatgaggtccacaatatggtcaaggacataagcaatgagtttgggaagaaaagaaaacgtaacaagacaaaggagaagggtatgtggaaaaaaaatccatattttggcggctaccttactggaatgatcttgatgtccgtcattgcattgatctcatgcatgtagaaaagaatatgtgtgagagtttggttggcctgatgttgaatattcccgggaagacaaaggacgggttgaacgcgcgccttgatctacaggacatgaatattcgcagcgaactccagcccatatgagatgcagagacaggtaaagtgtacctcccttcagcctgccacacactgtcgaaggatgagaagatcgcaatgttatcatgcttgaaggatattaaagttccatcgggctattcagcgaggataagtaagtatgttaaattggacgatctaaaacttgttggaatgaagcctcacgattgccacgtgctaatcacacaaatcttgccagttgctatcagatgcattctaccaccgaaagtgcgtcacacgatccaacgtctgtgcgccttcttcaatgcaattggacagaaggttatagatccagaagatctagatgggctgcagaccgatattgtgaataccctctgtcacctggagatgtttttcccactgtctttctttgatataatggttcatctccctgttcatctggtgaagcaaacaaaactatgtggcccggcttttctaagggaaatgtggccgtttgaaaggtacatgggagttctgaagtcgtacgttcgtaacagagctaaacccgaggggagcatcattgaaggttacacgaccgaggaggctattgagttctgtgtcaattacatgtccgatgccgatcctatcggagttccagtgtctcgtcacgagggaaggttgtcaggtgttggcacaatcggaaggaaaagaattaggcccgatcaagcgtcgtacgcgcaggctcattacgctgtgctccaacatatggcagaagttggcccatactttgaggagcacttagcgaaaatccgagatgagaacttggggcgatctgatgcatggattaacagagaacataattctcggttcaacgaatggttcaagaatcgtgtgacaatgtccacggatggcccaaatgagacagtacagttgttggggatgggaccgtcttggaccatagacacatggcaaggatacgatataaatggatacacattttacaccgtcaaacaagatgacaaaagcatagtgcaaaacagcggtgtccgtatagatgcattccaggatcaagttgggtcaaacacatactacggccgcattgaggagatctgggagctaaactacgtcaagttcaaggttcctttgttccgctgccgttgggtgaatctacgcactggtgtcaaagccgacaaggaaggtttcactttagtagatctatctaaggtgggatacgccgatgaaccatttgtacttgcgaaacaggtcgagcagatattctacataaaagacccttcaaacaagaagatgcacatcgtgagggatggaaagcgccgaattgtaggagttgacaacgtcgtcgatgaagaagaatgcaaccataatcttcatgtaagacctcacattgaccttgacgatgatccccaagagcctgtggcatatgctcgttcagatcataccgaaggcataaccttgtgactgatgcatttgtacttatctattgtaatgaatgaagtattttgttttattgtaaagacttgatatgtgtagtcattaatatggctaattttgttttattacaaatgaccaaaataaaagttatagatcgtgatgagaggatcaactttgttgttgaccatatttcaatttgaaatcatctagtatttacaaatgctgttaattagatttgtcatattgtcgaaatcaatttcaagctgttgggaaaaaaaattatatagaataatgaccaaaataaaaatattagatcttgaaaggctctacaactttgttgttgaccatatttccatttaaaatcttttactatccgaaaatgtattatgactaataaaatgaattattacacagctgctatatattttgcactcacaacaaatgaaagatggaaaatgagtcaccggtgacgggccttagtttacggccgatagagattaatctatctcaatcgggctttgccgtagggcccgtcacagatgactcatcggtgacgggctccatactaatgcccgattgagatgacattcaggcccgtcacggatgactcatctgtgacgggccctaagataatgcccgatagagatagattaatctctatcgggcttgaactaaggcccgtcaccgatgactatttttccatttcccagataagtctttatatttgtgagtacaaaatatatagctgctgtataataattcattttattagtcataacacattttcggatagtaaatgatttcaaatcgaaatatggtcaacaacaaaattgatcctctcatcaagatctacaactttaattttggtcatttatctatataactttgtttctaacagcttgaaattgattttgacaatatgacaaatataagcatcatttgtaaatactaaatgatttcaaatggaaatatggtcaacaacaaagttgatcctctcatcaaaatctataacttttattttggttacttcttcatccaacaaagtgatagttatattattcacaaaaatcacatttctctcatctggtttataaatatcaacacagatatgtcaattttgtaaacattggtactatcactttgtcggatgaagaagtgaccaaaataaaagttgtagatcttgattagctgtacaagttagttgtttatggctttcccatttaaagtcatgtaatatttacaaatgctgtttacatttgtcatattgtcaaaatcaatttcaagctgttagaaacaaagttatatagataaatgaccaaaataaaagttgtagatcttgatgagaggatcaattttgttgttgaccatatttcgatttgaaatcatttactatccgaaaatgtgttatgactaataaaataaattattatacaacagctatatattttgtactcacaaatataaagacttatctaggaaatggaaaaatagtcatcggtgacgggccttagttcaagcccgatagagattaatctatctctatcgggcattatcttagggcccgtcacagatgagtcatccgtgacgggcctgaatgtcatctcaatcgggcattagtatggagcccgtcaccgatgagtcatctgtgacgggctctacggcaaagcccgattgagatgactcatcactctaatataactagggtttctcagatcggatcgaaaatttttctaagtcccgctacaatttcccgcctccttagaaccctagcgccgccgccaacttctccttcgccaccgtcgtcctccctcgccaccaccgccaccgagcccgccgccactgccgccgagcccgccgcctccaccgagcccaccgccaccgccatcgagcccgccgccgccgccactgagcctctacaccgaccggcgtcggccttcctcgttgtcgccgcctgcctcttcaccgacacgaacagcagcccccaccaaggccggcgacgtccttcctcatcgtcgtcgcctactcctcaccgacgcccgacgccgccatgaactcctccttcgccgagcccgccgcctgcaccgagcccgccgccgcctccaccgaccggcgacgccctccaccgagcccgccgccgccaccactgagcccccccggccgacctcatgtgagtcctccatcgcgcctccctctgctacctgcatgtggttgataatgaaaatgtggatgctgggatgaaatgtggatgttgggatgaatttagtgattgatgacttgatgatgaatagatggaatgtggtgcattaatgaatttagtgatagatgattttagtgatagatgattttagggattgatgatatatggtaaacgaatgatttttttgattgatgacatgatgatgaatagatggaatgtggtgcattaatcaatttagtgatagatgcatgatatgtggatgaatagatggtatgaggtgaatttatgattttaggatttgatgatatgtttaatttatttatatgtgccattcaattcattctatcattgtgatatgcgcaatttagtttatttatatgtttcattgatttttataagtgacattcaattcattgtaatagattgtagcactcaattgtgttttttttgtttttttggaaaaaagtagacaatgtctcagcaaggcgaaccaatgtcgacgacaactagtgggtcctcaagggcacgtactcctaggacagggaacaaaattcctaaggaacggttccgcataacagcggtggacgccgtagggttaccgacatctccaaggaaaatattgagccgatttaggtctatctgcggggtcatagggaggcaaaaattcagtattctgcaagacgacttcaagctcgtgccggccgcagagaaggacattgcttggctaacgttcaaggagagctttgattatcctgcggagcatgaggaccatctcaggcgggctgctttcaaggttatgggcactgcttggaagaacttcaagactaagctagtcggcgagttcgtctacaacccggcaaatcaagatccaagagagaaatttccttggatcacggaacaggtctggtcggaattccatgcgaagaagtcgacccccgagtccagagctagaagcgaggcatattgcttgctccagaccgggaaccagcatccgcaccggcttggtaccaccggatatgccggtaaggaagaggaatggcagcgtgaggatgaagaagcggaggaatcgtgcacaccgttcgtgtttggcgatatcccacaccctcgggctaggaactgggccagggctaggtaccagaaacatgatgatggcacaatcttcatgccaaatgcaaaagatcaacgagtatatgaagctatagtaagtgtctaatcaaactagatgttcgcattgtttcccatcgtgcagtttatttgaccccactaaattgtaatacagaaggagttggttgccgagcaacaagcctcgcaagaggcctgctctcaaagacgcgaggacgacctcctcacgaaagcattgggcaacaaagaacaccgtggacggacacggggcgttgggtcttctgttccctagaagtatggatttccagactacgcgtggcagtacaagaagcggacttccaacaaggcggagaaagatgcacgccttgaagccaagatccgggagtcgatacgagctgagctgacatctgaattcgacgaaaagctcgagtcgatgagggccaagattaggcaagagatccgagaagagcaacagatcccccaggccgccgctgctgctgcgcacaaagagttaggaagtcccaccgaaaaacgcagcagttgcgcatcaactgagttggcggaaaatccaacatcggtcgacagcgccgtcgacacataacggtaaccgtgaacttactcaatacatgaaagacgtaacgaatccatatgatatataatactctaaaaaaattgattaatctattgtaggaaccaacgagctgcaccctcacagttagggtgatgccgaccttcactgttccagcagccgagggacttgcgtacaagccgaccccagagacaagagtgcatggagcgcaactcagggccgactatgcaaaagttcaagtcgactcggtgaagcccgaatacgagctgttccctctgaagtatccaccgaacgacaaggtcctctcactaggaaatgcccgtggtaccttcatccaatggcccaaggacctcattgagatcagggttacagcgaggccaaccactgcaccaggcggtcgtccaccaaagagacccgcctctgctccttcagcccctcctgctcaagatcgtcatgcacaatcttacgatgtgcagttgcagtacgacacggattttggggaggaccgaacggaggccgacagcaaggcgattcatgaacccccaccgatgaagaagagcaggaaggcacactcttcccctcagagaattactctcgataaacccgaagcaaaggggagaggaaggggaggaaaggtgcaggcctcgcttctagctccaagaaagctagatctgggcaagggccaggaagagactaagggcaaagaggtcaagaagaaatatgtcgctccacaggagttccaactaggcatgccattggttggagatgacgtgcttgccgcaatgggcaccgcttgcaaggaccttcacttatactacatggagaaatctaacgccaggaagccaagtaaagctaccgatatccttggacagcacgatggaaagccattccttggtccaacaaattatattgtggtcgacttcaaggatcttttcgacctctacaggctccgagcggtggacacgagcctccttaagtgctactccttgtaagtattgtcgcccaactcattctggtaataacaatcggtttaatttgcttacaagatcattgatcctgtgtgtaggttaagttggcaatggtgtcagaagcatgcaccggaagttgccttccttgatccacaagtggtcactgtcacaaatctccagaatgaccgtcaaggaatggtcaactacatctacgacaccttgtggtcccgccgagacaaggagtacattatgtgtgcctataatcaatagtaagtgtgttaactaaatatacacaacagcatgacacattccttaagtacttaattaactttcactatattaatgccgcagtgcccattggatccttctggtcataacacctaaatagagtacatgtcattacctgaactccagaattgataagaacgcatatgattggaccccaattcaactagcgatagatgaagcgtgggcccaatacgtgcaaagaggaggcctcaggaagacaggacatgacaccctcatccacaaaaaagacttcccggtgaagcaacaaataggtgaccagtgcggattccatgtgtgccacaacatgcgacttctgtatagagaaaaggtgaagactttggctgagtttgaggtcggtggtctcaattgtgatagactaactacattttagtacttatatatgatcgatcaactaatctggaattatgacaatgtagggcacaataaccaagtctctgactaccagctttgaggaggttcgcgaggagatagccagcttcatcctccgcgaaataattaaccccaaaggaatgtttaggcttaaactaaaatgatgaacaatgttgaacttctatgtttaggcaatgatgaacacttattatgcaactgtggtgatgtaactgtgatgcttatatttatgtatatatttcatatgtttatgttaagacttgctaaataaatatttgatccaattaactcggttttgcaggtgaaatatgataaatatttgaatggatgtgaaatatgtgaatggatgtgaaatatgagatggctgtgaatgtgtggttgtgtgaaatatgttgatgtctgtgtatgtgaatgcatatgtatgaatgggtgatgctggggagctggggatattggatatctgtgtttgtttctgtcatttttgcagcgggcatggctagcaaaggcctgaggctagccaaaaaacaaaatttattttttttgtggattatagtcatctgtgacgggccataactaaatgcccgattgagatgagatcatctgtgatgggctctagcttaggcccgattgaggtcagcagtcatctgtgacgggctctaatttagacccgattgagatcatcagtcatctatgacgggctatagtttaggcccgattgagatgagtatcatctgtgacgggctctagtttaggcccgataaaggttagtagtcatctgtgacgggtgctagttgtggcccgatagagataggtcatctgtgacgggctgtagtttgactggtcatctgggtcaaagctatcggtgacgggctttacttagggcccgattgagatatattcattcgtgacggccgtttgcccgattgagataactcttcacatcagtgacttctagcctgtgatggatgttgtgcccgattgagatggggcttaccgtccgattgagatgagggtatccgttctagtgtaaacttaacacaattgctcaaatttttgaggaaatttaattttgggagagagtacatgcacaagtaggtgcttccgataatctcgagtgcgttcaatttatatttgaagtatcattagaagttactaaattatggtgctcgattggtgaacatgactcactgctacataaagacacatggaaattggcactataggtaccacaagtactaaaactgacccctataatttttttcccaccttcacgggctgaaaacacacgaaaaaaaaaccaacacctttaaatgattatacgattataggtgctggttctatagatatggaaagtaccagcacctttaagcggttataggtgttggtactttgatatggatgttaaccaagcaactagcacgtctgtttgaaacatgtctacaaatcatgtccaaactttggttttgatttctggagcatcaaggcacggtaaagaatattattttaggtggatatcttctacacagtatcaccatgttaaattatcaaatgcaaaaatgccaagcatattttgatctccattggcaaattgtagttccatcatatttaccataagaaataaatgtgatatgatctcccaaaacaatatatatatatatatatatatatatatatatatacacaccatatcaaataaattatatccgcatttatatttttcttgggtgcatgcatgagatatgtgcattaaatatttgccacttccaagtattcaaaattaaagcatgcatatccatcttagatgcagggtgacaattaaatgactaagcaacaccctttaggccatcttcaattctcaacgtcatctagtgtccatagcattaaatacacagacatttatgccatacttccacactacaaatagccatccacccttcctcttctcctcatccaacacatccaattcaactcatggaggccaaggttgtagccactgtgttaatcgttctcttcctcacccttggtgagttcactatctgctacacaataatgccttgccattatcactgccaattcacaattagcatgacaacaaactattaattctacagtgactaagcaggcagtgatactgctgagcatcatcatcgattatcagatcatacataagtactaattaccttgtactattcctaatcaagtattgattgatttgtttcatgatttgtgatgagcaggtggtgaggcagctgccaagatatgccatgatcatagccaaaccttcaaagggatgtgcttccatacctccaactgcatcgcctgctgcaccaacgagggatacaccggcggctactgcaaaccatttacatatagatgcatgtgcactaaagattgtggaggggacagtccacctgatgatccaccaccggcgatgccgacatcgccggcggcgacgacgacggtggcctgatcgccggagaggacggcaacatatggttacattgtgtgttagttgtttgtggcaatatgaatcaattggtggaagtctaatgatgaactgaagagaataattggatgttgatgcacatatgttgcaactcaagtttcttggttgaagatagaatggcatgcaatggagaatagtgagatgtgtttgctgaaattgactcttaattaaacatcataaataaacaaagtaaatttgacttaaacatggctcagaaagtgaaaataaatggatgattgaacattaaattgtatggcctagatcgatttaaattagataggggactgacatgtggggctagggggtatttctgacctctcacaccgtatctctctgattcaaccgaaaatgtatattttataagtgtggtgtccaacaacaaatattcacatttcgagagtgtatttcccaaaagattgacttttgtcgtgtcctgaagttaaaactgtaaagtcatagtgacctgtagcaaaatttatcaaaaaaataagttactatagatgtttgattgcataacatggtttgatatataacttgatcaacaaggcactgtagacgttttaaaaaaataacatgattaaaaaaagttatgcttcaaacatctaatagtcattactttttaaaaaaaaaagtagtggggatgatacacagtgaatctactaccatcccaccaccaactccctctgttaaacatccaaaaataaggatgtgtttggttcgtgggatgggtcgggttaggatgcgttggtcctatttttaaggttggagggatgtatggagtgggatgaacccagatgggaatatacctcttagatccaaatccaattagtctgccaaaatcggctgaaccaatcgaacccacttcgacggagcgaattgcgttagcatctcagcgaggatccgctactcctgccgccaccatgggccgcccgtccctcctccgccgcctggccaccggttactgctgctccttcgcgcatgtagtccgctagcccactcaggccattcatctacctcaacgctagtcaatgccgctcgagacagtcgtccgcttgcctgtcagtctacactgcctccttccacctactcgctcgcccgctcgccgagtcaccagccgcgcctctctccacccgctcgtgaagctcctccttatgcctgctcgctcaccagcgcaccactcctccgtccacacacgccgccggtcactcccacactgctcctccttcagccgcccgctattcgccgcccctccttcctctgcgagttgtgagcccctcttctcgtcggccaccaccactcctccacttgcaggtcgccgccagtctccactgctatcctccacgagctgcaatcttcgggttctctctactcgctgggaataaacgtcgtgctaacgtggctccaaacgtaattcatcccatccctgcctcatcccttctaccaaacaaaaaactagaatcaccccgtcctacaaaccaaacaagcaagtagggataatttcatccctaaaatcagggattgtttcatcccatccccatatagtccccaaatcaaacatatgctaagagagcatagggctaaagggctcacctatgacctttacgttgattatattttttttcttctaatacatattttttaaaatttctaataacatatagtcattcaactagtgtctacaaaaatcctttccaaattgtttttcaagttatagagcatcaaagcaagccagcatagtaatttagcttatggagaatcaaggcaggacaacaaatttaggtggctatattctacacaatatcatcatgccaaataataaaaattcaaaaacacggcgaagcatatatgacttccactgaaatgaatagctccatcatatttactataagaaatagataaaagtatgatatccaaaaacaagatatgccatatcaaataaaatatgcccacattaatgttttctagagtgtccaagatgtgtgcattaaatatttgtctcttccaagaatccaaaatgaaggtatatgtgcatatccattttggatgtagagtagcaattaaatgagtaatgcaacacccctaggtgccacacatttatcaaacatgacagtcttccacactacaaatagccatccaacctttcccttcctcctcacccaacccaacacatccaattcagttcatggaaaccaaaattgcatccactgtgttagtcttgctcctcctcacccttggtaagttcactcaccactcaaaatggctttatcactaccggttcataataaaagctgggtatcaccattgattcctggaattcttcccaacctcatatatggtaatgctaattatcttttaaatttgtagttaaaacattgattcatttgtgattttgtgatgagcagatggtgtggcggctgccaagatgtgtcatgatccaagccaaaccttcagaggcttgtgcggccaccccaccaactgcatcgcctgctgcaccaacgagggctacacaggaggctactgcacaactgttagacacaaatgcatgtgcaccaaagcgtgtggaggggagagtccgcctgatgatccgccgtcggcgatgccggcatcgccagtgacgacgacaagagcctgatcgctgaaaatatatatgttgcaatggagaattagtgagatgtacttgctgaaattaatggattgcaaacaataaagaaagatgattcacagtagaattaatggtcttgtataagggagaattcccaaggtcctgatgtgaataaaatcgatgtctatggattgaatgaagtttcaagaaatcttgggacaaatttgtaatatctcaagctttccattaatcatacaccgagaacattcccgtccgaatgcatatgtattgtaaggataaattaaatattacatattataaacctaataaatatcttataacaaactatgctgatgtagaaagcttgtgaagaaatcgtagttttgaaagcatggcacgaatgatctgcacataatccattggagttaatcaaaaaaagaatggaacctagccatcaagagcttcagcttcagcatcagcctatcaccagttaccaacttattaagacaggtttggactttgtactttttcctagctcatcacttatgttatcccaaggtactaaatatgattcacccaagaaccaagaatcaggaagctgaagctctaccaaacgggacctttgagctcataaagatctaactggaacaattgggtcacttcagcccaaaaaaaaaagaagatatgcacactcattctcaaaatatccataagctttgcaaacttatcaccactatccaaaaccaagatggcatatctatgtcttatgcatggtgatgcaatgtgtctaaagtcataaatgccaagactcccataaatataaattagagtaacaaagatatacaattcattttaaaatatcacaacaaaaatatgcacatatatctttctaactccctagcatccaaaaacaagatatgcaaatctgcaaggtagcaagaaatgtaaaacctatttccatgcaagccaaaaccccagcattcatactaccaaaatcgattcaagtcagttcatcttgtttcagccatggaggccaagttgcagctgcagcagccttggccttgctctcctaacctgagtgatctgccaccgatggggatggcactagagaaggcttgagtggacaaaattaagccgcagaagttctggtataagttctatctgtcaacaaaatcctggaataagcacaacaaaagagaaattaagctttatggttcataaatatatacacgagttagcatcgtgtgtaaatcttcagtagaagtatagcttcaccatatatacaggcattagggggtaaaaaaatgtatcgtgtattcatgtacatccacatataggcacctctcatttctactattaagtgaataatgcaaaaaagaaaaagaaaaagaagggggcaaaaaaattcactctacagttatttgtaacagggttgtgagccttggttttctgtatctcctcaaccacagagaggaacatactacactaacagatgagaacgccatgcaagcaccagccagccaaggtggcatttggaggccggtgaatgggaagagtgctccagcagcaaccgggatagcgatgatgttgtacgccatggcaaagaagtagttccatcggattcggctgaacgtcttccttgagaggtcaattgctgtgatgacatcttcaaggttgtttcgcaccagcacatagtccgctgcttcaattgcaatgtctgttcctgcaccaatggccattccgacgtcagctgctgctagggctggggagtcattgatgccatccccaaccattgcaacgacactcccatccttttggagagaacgtacgacatcagcttttcccgcaggcataacctcagctctaacatcctcaatgccaacctgcagacaacaacttcaagctattaggagtttgtttgcatcaaaagataaaataacgatgctacctagcagctgagcagtagtgcagtacaacatgagaatgctaaccaacctcctttgcaactgcttgtgcagtcctccagttgtcccctgtaaccattactggatagatgcccatcttttttaggccttcaacaactacaacagcctcccttttcaagggatcagtcattccaattgagccaatgagttcgctgtcatatgctacaagaactcctgtcttcgcgttcagttcgaggtctaccaagaaactttcagcttcttcaggaatatttatcccattttcagttatcaaagtacgatttcccacctacataaacagttaagcattatcagatttactcacgcatagaaatttataaatcaaacatcagttacttaagagacagtcaaggggtaactgactagctgtatcatattcatatgactcaccaagatttttttcccattgatcaaacactgaacccctttgccaggcaaggcagaaaattctgctacttccagaagccactgggataatatctgttgttttcttttcttgatgtcatcttttgatgaggggagtttgccaaagaaatggaaatgaaatgcgtaatccaatatagcttttgcaagtggatgttcactgcttgcctaaattacaataaaagaacagaataagattacgatgctttcgcttcatttgaaacaagcatacacatacattaatgtaattatcctagggaaatctttgaattacctctgcagatgctaccaaagtaaggaagtctccaagatcaattcctgagaataccttcgtcgatgttacggtagcctttccttgtgtcagtgtcccagttttatcaaatataacatatttcacattctgagccctctccagtgcatctccaccctttacaagtaccccatgattagccccaactccagttgctaccatgacagcagttggcgttgccagaccaagagcacatgggcaggctatcaccacaacagagatggagaacatgagagagaagacaaagcaattgctagtttcatcaacccatgaatttgggtatgctcccaacgatccgcaaagaaacctagagaagtcaacaggcatatgtgagaaacgtgaacactagtaaccacagttctggacttaaacagatgtacaaaacttaccatgcaatgaacgtaaccaaggacaaggtgacaactattggaacaaaaatgccagccacctaaagaatacatgtattgtcagcattttacagcaagtattggtagttgtagcctagtagggatgcatatgtaaagactgaaaagcaaaatgccaattcatggtaaaaaagatgcataaattccacaagtagctggacaatttaattccacaagtactttaatatatattacaatattgcatagataataagttactctgtaagacttcataaagtatcaaccatgcattccaggtaacaaaggaagtgggaagtgatgtattgagatcccgtcaagggaaatgtaatttcctccataaggcacttatgaacctaactacataagttgccccgaaacaatttttacggatttaagatttgaatagagaaaaaattattttctcggaaaccttgaatagaaagatgtactcacataatcagcgaacttctgaataggagccttagacatctgggcagtttcaacaagagagattatctggctcaagactgtccctgatcctactttagttgcttgtatatggaggattccatgtaaattcattgtgcctccaattactatactggatacttccttggagataggtgcagattcaccagttaccatactctcatcaacatgacttgtaccccaaacaacagtaccatcagcaggtaccttggaacctgggagcactttcaagacatctccaggttggattaaggatgcatcaatctccttctctgcagcatactttccttctatattcaaggatagtattatgagttggtacatttgcgaaagtctactagtatgaaaatgccttaagagtatgtgtgcatcattgcaattctaagaaatcggttaagatacaataccaagccaaaaaagaaatactatttgaagataatttggaaatgagctttctgaaattgctactaccataatatgaatttgttacctttgtctttcagaagcaaaagtgctgtagcagggaccagctctacaagcttcttaatagcgtctgatgttctgcctttagcaagcacctcaagatatttcccaaatagcacaaatgtgattatcatggcacttgtctcaaaatatttcgggggatgaaatccagtgaatgcaccataaagaagcgcacatacagagtagacgtatgatgcagtggtgccaagaacaactagtacatccatatttgtagagccatgtctcagggccctataggctgcaacatagaatcgtttgccaacaccaaactgtactatactcaccagtatccacttcaacaagtctcctatataaaatggtcccaagtgcatgagtaggagggaacgagtgaagtgtatgcgagggcataccatgcgaataaaaaatacaggaatctgttgtaagggaaccagaggagagtcagtatgctagtagcaggacataactcatgttaagttaatttcatatcagtgagaatatggcatatggaaattgtatcagataacactgacatgttagatgggccagctatttatatttacatctacagttatgacaaggctaagggcctgtttggcacagctccagctccacctctcctggagctgtagctcagccaaacagtttcagctccacctaaaatgggagcggagctaggtggagctctttgtgaactagagaggtagagctggtttaggcagctctataacttcactccagacccaactcctggagctaaatttagtagttggagctctaccaaacaggcccctaactattagcagaaaatatacattgaagtactcactagaaatatgaggagaatcagaaacctcttgggaagcaggacaaacaaacttacgcttaggaataagctagagcaaagaagatgaagcattttggaggcctcctgtgcatcatttgaagcagcccgtatgtaaggattctgtacatgggctttcagtctgccactgctttccatctcgatggtatccacaattgacctcaaaccaacaacttctggatcaaatacaatttcagcttccgagagtaccaaatttacgttgaactgacgcaagccttccattttttttaggatatcatgcaatatatctacatctacctcagtatgcaatcccattaagcctagcaaaaccttgtcttgttcactactttgtaacagtgcagcttcaaaaccagcatcctcaatagcctgaacaatttcatctttgctgatgacagaaggatcgtattcaacttcccctaatgaggtcgctaatgcaacaacagctcttttaacaccaggcaatttcttcaagataccctcaacagaattcacacatgcagcgcatgtcatcccccctatcctaaattgtccagataaagtgttctgcagcttgggctgagaaacagtagagtccgggagtagttctgcctcgaatccagcatcttctattgcttctatgatgtcttcttcctgcatgttccaacatggaatcaattgactggatgcatacatcttaataaaacagtccctttcaggacctttccgatacttaaagtaaaagcaaattagttgaaaaaaaaaaagctcgcagataggtaacagagcaaacagttggagtattttaaaggaccgaacatctacctacattgtagggagactgtttgcaattgcaagtttccaagttacaacactgtatcaaacaggattaatcatgaactggttgaatcacagtgaacaatgtccctatgtcataatggtgactgttgcaaagtctgctgcgccttcacagttgatactacacaaatcgccctattttcccataaaaatagacgtaatcccaatagttatcaacctcagtagagttccccccctccccccaaacacagcagcagcagctataaaaaaaatcaccataatattacgcatcctaccagctcagcttatcatttcgggttgaagtatttgaatcactagcttgatattgcacaaatcccacccaaaaaaaaatcgaaccagctctcgaattttcccatttggaacgaccttccaaatctaaaccaccctaactgacaacgaacgaaaacgaagctgaatttcccgcctcgagaaggaatcgattccgcggctcatctatcaccaacccaaatccccccagtccgagaaatccatccaccgcgacgcgctacaagggggacgcgatcccaaatcagagccccgcgcgcgcgcgcgcgacgcgagagagggaagggaagggatcgcggcgtgggggggtcaccttggcgagcgcggggtcgaagacgacgcgggcgcggctctggaggagcgagacggcgaccccgcccacgccacggcgggcggagacggcggcctcgacggcggcggtgcaggcggagcacgtcatgcccgtgacccgcacctgcacccgccgcatcccctcctcctcctccggccccggcgccgccgccgcctcctcgtcgtaggattcggggccgagcagcgcgacctcctccatctcgtcggcgccgccgcggccgccgccggcggcgagcggcgtgagctggagatgggccatggatgtcagagacggaggcggcaataattaggggaaggggaatgggaaggccaggaatatgggggagaatggtgggcgtatttgtataataatcccagaaacgaggggggtttcaggtaaatttgagggatttgagggttttttttttttgcaaatttcgcagttgtaaacgtttttgttttgtgggttggtaggcagcatctggcaaactgtcaaaattagagaattactttgtctaatgacttcttaaccctggaggcttggactaattttaagaacaggtacaatagcagactattaaccagctacaaacatattttaataagataaaatatgagagagaagagcaacgggctacagatctgaaagtaccttaatgtcgtctagagaggggtgaataggcgtttctaaaaattatcacaacttcatagcatattagaatgatgagaactttcggttcaaataggaacttccgatatgagattggaagttccggtctcaaccgaaaagttcggcggataatggaataaaacactagctatgaacttgtagctcaaataaagaaaatgtatatgaatcaaaaggtgacaaataaggtatctaaacaagatataaggtcaccaactaaatcaattaagcatgcaagtagatcgggtaaaaacaagctcatgtacaatataagagaatgcataaatgggcaaaccaagagaggagacacgtgatttgtttcccgaagttcggatccacgaatcctacatctccgttgaggagccacaagggccgggcctatttcaaccatttcctcacgaggttgcacaaatgcactcctcggtttcactcttgatttcttcccttacggaggcgaaattgaagccttcacaaactttccgtggcacaccacaaccttgggtgctcaccggcgacgcctagccgtctaggagaccttagtccccaagagtaacaaacacaatcgaagatttgcttgctatgaactcgagtgctcagagtatggagtgaagctcactagctctcaacttctcaatctctcaatccaactctctccccttctcaaatctctctcacaagaggcaccacaaaggatggagtgaagctcactagctctcaactcttcactctctcaatccaactctcttcctttctcaaatccccatcacaaagaggcaccacaaaggatgggaaaggggatggctatttgggtttggatgtgtctaatgttgcccaagaacaccagccactcaaaggaggggtggagtagtttatatacctgagcctctcaaaaactagccggtcgaggccaagcctgtaattttcggattttccgaaaagcattttcggacaagcccaaaaatctacagaagcaaatctcagattcgcagccattttcagaatgtccgaaaattttcgaagttatccgaaaaattttcagagtttccgataatttttcggactttccgaaaagcacagagtaaaacgactataacttttcgctcgggagtccctttttgatgagcttggactctatggaaagctcactcagaggactacccaactcaaccaaaaacaaggtctaaaaccactcaaaggataggttaaagcttgggtttctctcaaggtagcactatgatatgtcactttgagcaccgagacatacacaaacacctcgacgttgcatccctattaatagtacggcatttctaaactcaaatgtaaataagaagataattataccattaggaatgccttttttatttttctttcattgttttgagggacgccaatgccgataccgtttcaccatatattcttcaaatgattgatgcggttacttgtagcttcaaatggtctcgcacggtccatcatgacaaagccgtcactcgcccttcaccaccggatttggttcttcggcgccaagccccttgcttacccttcaccgccgcatggtccatcgctaccgagcatcacttacccttcaccgtcttgccataatagccacttcgtatcacacatcttcaatatcttcactttgtcattcttggtattgttaggtataatgatatcacttgagcatcaacacatttgtaatccttgggacctatttctttcattcaactcaataaaaatattagtcccaatgatccggttgtgaacctccacatgttgaccaaccgatcgcatgtataaaaggatatgaataaatgatgagtattaatcaataccacaagtgtcatatactcaaatatatgttcaaatgtaaagatcccaattaaatgaaggtgaataacttggatcgattacatgcataactaaagtataggatttgctccccctaaatgtatgcatacaaaatatttgtgtgaagcaagagtatgcataacaagacattaaatattgagagctcatcctatacaagaatagaaggcatttatcaaatatagacaataaaataaaaacataccttcatcatctccatgttctcaatgtaaagagactaaacaagatatggctcaaacaaaacattagtctcacatgcttatgtaatcacatgaaaatattatatatgaatatatcaatatgtgcacggatagaaagagagatacatatagcttgatctccatgcaattcatccttgtgatttaggtacaccatcaatgaacgtttctctctcaactcatatgaagtccagaaatcacctctcacatattccactttcatatccatatgagactagtagacaaagaaatgcttataataatgttagtctcatgtaattggatttgtcattaatcatcaaaaccaaattaacggcactcgaactttcaagatctgtagccagctataacacagacttcaagacgcaaatgtgtgtatgataggtgggaccatatattaataatatagtaaacaattagtatgaattggctattagattagttatagatgaattggagctagtagtgggctatactattaaacttgctctaaggtgactttgtagtttcttatggtttatcaaccgacgcttctacataagctattaatttcattgccatctacaatcctatcaatttctggatacttgtacccacttggtatctataacgtataaaaaaaattacttagttagtcataagtaaagaaattttacttattatatttttttacttgtatctacaagtgactcaatcttccgtttgcaaattttatttgttttttactcaattgttggctcttatgttaattttattcctatccgctatgtatcttctactctctccgtttcacaatttaagtcattctgtcatttcccacattcatattgatgttgatgtagattcatcaacatcaatatgaatatgggaaatgctaaaatgacttacattgtgaaacggaggaagtatttaattattgtaacaatgctatctatgatgttgcaaattaatgtggtattctgatgtgtgtattacttttttcccatttatccgccaagggtgtgtttagttcacgccaaaattggaagttttgttgaaattgaaacgatgtgaaggaaaagttaaaaatttatatgtgtagaaaagttttgatgcgatggaaaaggtataagtttaaagaaaaagttgggaactaaaccgggcccaattgactatcttcatttttttcatattaaaatcccctaaatacttcaagaaaatactcaggaactcatgaacattctaactaattccacaaggtggagggttagtcgggctgggttcgaaatctcatctattctattaatttgaaattaggttattttataatattggccttcttttttttaaaaaaaaaggttgtgctttcaattcgcttccattgtcaaggggccgggatgggttggtggcttggtgcccgacaacgtggataacacgaccacttttgcacatcagtcccctcaccttgggcccaattcgtttcttgccccctagaaaaccctttttttagatgatgagagaatcgatcagtacagtgccgtataatatgaaatttagttaatcagcagctttgtagtagtactgcatgataatcgtacgatgatgatggcgtcatttgcaaggattaacgagaggtaccggtcatgctggcgaagaagaaaagagaaaatggagaaattgtcaacgaggcgtgacgtgcaaggcagaaaattttggccatcaacgaacagacacgagcataggccgactttagtttcaaactttttcaacaaatttttaacttttccatcacagcaaaacttttctacacacataaatttttaacttttccgccacatcattccaatttcaacaaacttttaattttgatgtaaaaaacacaccaatagttaagtgcaattacacatactatggagcaagttatacatgtaagtgctacgtcctggaagtgttattacaagtagtattatttagcaagttttctactcaagtattccattattggttgcgcgcgtgggtaggggtgtaagtggctaacccgtgaaacccacttataggctaaaataaaccgcaaacccgcttattttgatctataagtgggttcgcggctgacccacttacagccctacgcgtgggtaatagggtgtgttcgccagaagcggttcccaaccgatacagtaaatacggaaaacggagcgatccattaacgcgtgattaattaagtattagctattttttaaaaaaaaatagattaatttgattttttaaagcaactttgatatagaaacttttaaaaaaaaaatgtaccgtttagcagtttgaaaagcgtgcgtgcggaaaacgagggagaggagttgggaaaagggccatccgaactcacctaaggccatgtttgattcagcttatgattattataatctggattattaggagtaagctgaaacaaacaagtatattattataatctataaaccagattattataattcaataatctcctctagaggagctttttccatattattgagtggctaaagacccactacccttagatgcatctaataatttagagaaacaaacaactcgtagcttattttatgttagcttattataatccagtatagagtaatctgatttaataatttagattacaataatgttaaggtgaaacaaccaggcctaagtgtagttaaaagtagatactggaaataatccggggtgatattctaattagttttcttttttttattaagttgcgattgtgtaaatttcattcgtccgtccataacttctataataatggaatgttattaagaagaaaatactagtaatttgagtagtgctattacatatatgtgcattgataaatgcagaggccagaaattaatttggcccatcttgtatttatctaaaagaagaaagaaagaaaatagtaacgcggcaaaatagcagtaggtactagtagatgtttgcatggacatggcttttgggaatttgggaagaaagcaaagcatgtagtacaaggttgtacgctctgtactgcaattttgttggaaacggtcacgagtgtactactacacaccacaccgcagatccatcgcatgttccacctgcttctagtagtaaccttaagcatggatcatcatcattgtctggtatctaatagttagagcagttacattagcaggctataagctagctataaacatattttaaagagataaaagcgaagagagaagagcaacgagctacagatttgtaaccagctgtagtatggattttaagacgcagtatgtgtttgacatgtgagaccagatattaatagtgtagtatgtacctattgtatgaattagctattaagttaactataaatgatttataagctatactattaaacttgctctaagtataatctaccatgccgttaaaattaccaaaactaccaatattatcagcaacatatatacatgtgttagtgttattgttatattttttatagcaaactaaacaccaccgagatactgtttcaaggctgcgttgtaatgagttattttcctcatttttcattagcacgttttctaaagtgataaacagtgtgcttgctgtgaaatttttttatatcatagtttattttaaaaaattaaacaagtatgcttttcaagtttataataattaacacttaatttatcatattataattacttttctcgtttttgtgggctttgtgataaactcatccaaacctccacatatcgaatagagtggcaataatttgatacggcacagttagttagttttcttaaagaaaagtatgggactaagagcaaggttaacagtatagctatcaactagcttcaatttatctatatccaatctaatagtgaattcatacaatagttgcttactatactattagtatatggtcccacatgtcatatacacattacgtcttggagtccgtgctgcagttggctatagatctgtagcccactactctctctcttatcttttatcttattaaaatatgctggctaatagtctactattgtagtaccaacataaaaagtgtgcagtaatctagctaggagtaaatgacagatggtaagcccacggtataatgggcctaacgagtttctagccggaaaggtccacttttggtcccttaaccacaaagttatacaacatcctccactatcaaaagcaagtgcaaatcgaacatgtagtggtgtagaagacggtttcgttctacgtgagtttgtccatctatatctaataggtcaattaaatgggtggttcattatataatttttattatattaactagcacaaatacaatagttttaatctcgatcaattttttagttggtccatggaccacagtgccacctagctagctacgacactgcctacatgacacccacatgatactttatcttgatcttcataccatgtcgcacatatgtaacactagaaaaactataaaaaatgaaaaactcaataggacccacctgtcagtcggccatctctcctctccatccccctctcgtgaacagcctacccgttctcctacaaacagcacggcgaagtcattgccgttacacagagacgcacggagccatacacacgacacacgaatcagcttctccgatgggaccgataggaaggcaataatattttgttaaggaaaaaaaaagctaaatcggaggtagcaaaagagtgaaacacccagtgggtctatcggctggctatataaagtggtggactagacgatttagattagagtatttgatattagttccttccctaatattcgtctctttttaatgccatccacatggcaccatctgtgcagtccaggcagggaagagatgaggcatatgcgtgtcgctgaatgtgggccctttgcatttttatttatttatcctaactgaaatgccacgtaggcagccaccagggacatctggttttaataatctggagccccgaatcttgagtaaagtccatcaccagtctctaaacttctaaacttgtaccgctgtatcatcccagtccctaaactcgcaaatcgaccgttcaagtcctcaaacttgttcgactgtgtcatcccggtacctaaacttgcagatcactcgtttagttcctccaacttgttcagttgtgtcaccccggtccctaaataggacggtctaaaaactttatattaaaaaataatttataacttttttatgtgaactctaatgaagacaaactttatatcaaaactgtagccctcgacgcgacctacaactttgtagttgaaaagtttttgaattaaaactgtttatggtcccaaaatattgttgcatgtttatagattttgaaattttaattttaaaattacattttgggacaaaaaatgacttaaaataaaaaaaatcaattacaaagttgtagatcgtgtcgaggactacaagtttgatataaagtttatcttcattagagttcacatgaaaaggttatgaattatttttaaatataaagtctttagaccatcctatttgacccagatgatattcatattcaagtttagggatcggggtgacacaactgaacaaattggagtacgtaaacgagtgatctgtaagtttagggaccgagatgacacaatcgaacaagtttgaggacctgaacggtcgatttgcgagtttagggaccaggatgacacaacggtacgagtttagggcccggtgatggacttcactcccaaaatcttggggctatagttgggggatgaataataaacttcttcctttctggcccgtgcagcatttcaggcccagcccaccaaggcccaatagtgcagagccttactcccacatccggcctgcgagaacgcatcctgttcgtgcatccttccgctcgttgtgtgcagcaaggcatggccggatcattcaagcttcatatgtaagagtgtcagattactgaaaccttccgtataaaaatgaatcaacttttaaagaaaaatatgaaaacacttgtttagattcatcatcataagttgattttttccgaggatgaaaaaaagtagatgtttgtgtgcgtgctcggattcagagattgaaagaaacaaccctttcttttctcacgataacattcacaaattcaaaagtctctgtttgttttttcttttaagaaaatggattaaatcagtcactacatccaaaatagatgtacacagccaaattacgtacctactactacaattcactttggatttcagaactactccctccgttccaaaaaaaaaaaaaaagataaaccctggttttcgtgtccaacgtttgactgttcatcttatttgaaaaaattatgaaaaaaattaaaaagataagtcacgcataaagtattaatcatgttttatcatctaacaataataaaatactaattataaaagaatttcatataaaacgaaacggacagtcaaacgttggcacggaaacccagggtttactcttttttttgggacggagagattacctactatcctactgtgaagatgctcatagggatagggttgcgtgcgtgtgttcatagggggtgagtgcgcgtgcgttgtgagtgtctgcgttgtattgtaattctaaaaaaaacatgaacccatcaacaaaaactataagaaaccaaatgcgtttactgcaaaagcaaacaataccaggtggataggatcccaaggccgagtttagttctaaacttttttttcaaacttttaactttttcatcacatcaaaacttttctacacacataaactttcaacttttccatcacatattttaattttaaccaaatttctaattttggcgtgaaaacacaccccaatttgatcgccgttgcgttgctgggtgcgggtgggtgccagtgagcatggtcaaaagacaggaataccggacctgcagtggtacgtgcaggcagtcagagctatgttagctggggtaacagctttcatgccgaaagtttggatagtttttggcaaactgcatgacatggatgcatggatggacatgatcgatggatccatggacgtgacagatgagataattggcactcatgctacacagtaaatactcctttactttgtgttttgaggagtatcaaactatcaattagtggtgcaatcgtgtgtttcgaggacttgaggaagatagatctggatggcatatctcgtattaaattaacttattttaaattgatggaagtagtaagcacccgtgtgtgccaagacgaacgcaatgcatcgtggaagaatgggaccccctatgaagagggattaggctgtgttcgggaggcatggttgccaaccttgccttccgacgaaaaacaaagcacgtgattatagtgagattaattaagtattagcaaaaaaaacttgaaaagtggattaatatgattttttaaaataactttcatataattttttttataaaaaatacaccatttagtaatttgaaaagcgtacgtgcttataacgagagaggtgggttgggaaagaagggataagaacacagccttaataattgactagagtacgagaaaggcaacaagcatgcacgttctcccgtccctttctttgttcaatttttccttctcaacatcgagtatacacatacacgacctgtcgattagtccatcttcctacagcatagataggtctcccatcgttggcctcatatctatggccatcttggtctttgacaagggaagaaaagaacataagcatgcatgtttgaaggagctcgacgttcgaagtaggtaacgagaatataaaaacattgacttctctaacttctgtctactagtttattttatttacttcataataattactatatacatttgtatcttttaatagttatcacaaaatcatttggttatttagtcattaagctatttaaaaaggctatatagtatcacaggcctacttcttccgtcccataaaaaatcagtctagtaacggatatgatacgaatctggataggcatttattcacattcatagtaatcatagtaatcagacttcttcatttaaatggaatcagacagtagtacaatctccattctcttttgatgggtttgttccatttcaattatgatgaataattacatagccctaaaatctcccgtcccttcaaatctgaaaacgaccgacttgagatgattggctccgtaattggactctggacgaggtctcgtgtgagctatgacaacatctgatattcaaacaccaaaactcgtgatattcgaaaaggaaaatcgtgatatactccctcctttatttttcaaaaatactaatgcatgtttgcaacatgattttagagaaatgcggacaaatgttttattgggtttaggtttcctctaattggtttgttccgatgggttgatttttcgtgggaataccttttttttgtggattattttatctttcttttttacatgaggagatataatggaaaagaggagaacggcttcgtttttatggtagtagagatagttacgtgtaacatttgataaattttatcctaaaatatagctgtacttccaaagtactaaggtatgatcgtagtgctaataaaaaaataagaaggaaagattgtagtgatagaatatccaaaatacccccctcatatctctatagtttttcagaacatacatatgcatttctgctcatcagtcatcaccatgaacacaaccaatcctgcaaaccgcaaaactaccatcaatagttcgatctactcctgtcttatgcatgccttcaaagcttgtttaggccttatttagtttcaaactttttcttcaaacttttaacttttccatcacatcaaaacttttctacacacataaacttttcaactttttcatcacatcgtttcaatttcaaccaaactttcaattttggcataaactaaacacacccttagtagtgttggagtattatctgctcctatctatgaaatctatcaatcggttctccgctacagttcaacaagagtagatggaaggacgaccatgtaaaacaatgggagaaaaagagagagagcagaggatggtagtggtacactagtactactccccaattatgtcatttttattttaaaaaataaggaaataccacaaagacatgtgatggtataaatggtggtatatgaaagaataaagtactacaaaatttagtgtgtgggaggataaaatagtataagggcatctttgaatcaaaggatttatgtaggaattttataggatttaaatcctataggaaattttcctatttggccctttgattcaaaggattgaagctttccaaatcctatgaaattcctatggaatggcacattgcatgtggattttggaggaaatttagcaagagctccaacctcttggaaaatttccttttagtctatctctctcattcgattcctgtgtttttcctgcgctccaatcaaacgaccattcctatgtttttcctgtgttttgcaatcctctattttacacttcaattcctgtcagaatcctatgtttttcctattcctccgttttttctaccctgtgattcaaaggggccctaaaagtggatggtggagaataaactagtactataaaactagtagaataaacattgtctcaaattataaaatcctttatattttgaaacaaatttgaaggggggagtaccatggttgagaaaaagcaacaataaaagcttaggattcatggctacatgcaaatatgcatgcagttcttctcctactcttgcagtgatgatgatgagtgatgaggcaacaaggggaaaatattgtagtactagtgtactactactatcttggtctcttggagctggatgcatgcaaagcaaaggattcagatttgcagtgagcagatgagttgaattgcaatgagatggggggaagaaagctgaagtgggttctgaactttctgaaatttgttagccataggaggattgggacttgtagggagccagctatgcatttccttgtcctagctatagctagctgctccttctatggcatagtggtactagtagttgtcataccgaggaagtggattggaactggagcatgaaaaaatatcgagtgtgaatgtgagcattttagaaaggacaaaaatatttgcaccgtgtttagttccaaagtttttcttcaaacttctaacttttctatcacatcgatcaaaacttaactttcaacttttccgtcgcatcgttccaatttcaaccaaacttctaattttggtgtgaactaaacacaaccagaaagttttgaatttgtttccacgcatggatatccaagtaagggtgtgtttactttacgtcaaattttaaagtttaattgaaattaaaacgatgtgatgaatagttagaagtttgtgtgtgtaggaaagttttgatgtgatgaaaaagttgaaagttttaaaaaaaaattgggaactaaaccaagcctaaaaattggagtagtatgcatcaccaccatcaaagattcctcaaattgaattgaaaacaattgtcttgtctttatttgtttttatgtctcatcgtaacaattgtacacatatcatggttgattggagaatacaagtaaacaaacacggaatttttttttgttatatccactcaacctacgatcaggttacatcatgtttgaacaatataaactggcaataaaaaacagagacaatacaaatgacaacaacaatataacacttcgatcacatccacatatccgctatactctcgatcgatccttataaaagtatcaccaagatattacgtataatctccctccaaattttttaggtttcctaaactgaaaatagaaaataaatgatctctctaaaagaaagtctaaattttatcaaaaaactaaaagtgggtccttctgttaaactaccaacataattctccgttattctcggtgcgcatggagaatatatcgtgctcctctaagacgggatgtgttggacccaattttttttctaaaatctcttaaaattagttttgaaaaaaatatagattttaacaaaaaaatataggatacctattggtgatgctctaagagcaataggccttattttaaagccctaaaagttaaatgagggctgcccccatctcccaaggatccaaaaaatacctccaactctagcaatagcccctatttcttagcccctactcatgtttctattttattttaacatgcaatccatgtttacactatgtttaacaccacaataattaaacataaatatttctaacgcgtataatttaaccatagttaaatttacaatttcaaacgccacaattcaaatccaaaatcaaaattttcaaacatgtaaatatggtgtgggcacaataccatatacaataacacacaaccaagatttataattcaccaatgaaaacgaaaattgctcaccaacatgtgtagctcaggaaattaaacagcaatacacctataccctctagaatacgatcacaagatttcagtaatagaaaggtgaggagctttgcccaaaaccatattagctcgatccatgcattccccctgccaatttcagttatagtactgattctctgctgagttgtgatattgtcgatttttattatgatcactaaaatataacaaagtgcccaccaccggattctttctcaccaattcattcacatgatcagttcgggcataattaaccacctatcttatagaatttccctactaatatctgaactgaacagaaatttccacatgcttatctctgaacagaccaaaaatttggctccaacaagagatttctaaatacacacatccaatttatctcccacaagctaaatctcaacaaagaacaaatcttatctaattgcatccacaaattcattggaaaaaaaataccttcgactattgccggccggggagaagggcgccggatgtggaggtggtttaccaggaggaggccgccctgcagggaagtggctggtagggcaggagggtgccaggaaggaggccaccgggtgggaaggtggccgacaggggaggagatcgctagccaaggaggtgatccaccggggaggagtgcagcgaggaaggaggtggccactggctagtcgggagaggacggcgctgatcaggcggcgcacatgcaaggagaggatttagcggcggcgctagcaaaagtttcgcgcgaaaaaagaaaacaacgcgcggatgtgggagatctctcccgcgtgtggaataggagccagcgagaaagcccgtaggcctgggggcttgaggggataatttggaggccttcctattttaggggcttaagtaggggctttgttagacctgatttttttctctcaaccctcaaaacttgtttaggggctttgtttaggtcccctgctggagatgctctaacctctcacacaaaaaccaccatctactctcaaattacaatggacatatagccgatcgcgaaaaccgccctcctaatcccatcatccacacccaataccgctattgacccacacacacccaagtatccccaatcatccccacaagggagaggatgacatgtatgccaatcccatgccaacaagccaatgagaaaacatatagctcatcaaggttttgcatgtatataggaaacaagaacacctccaaaaccaaaccaaccccagcactttgtaccacccatcatcacacccccaaaactcatatatccttcacacaaacacatactccctccgtcccaaaaaaaaaagtaaaccatgagtttccgtgtccaactttgactgtccatcttatatgaaatttttttataattcgtatttttattgttgttagatgataaaatatgattaatattttatgcgtgacttgtctttttaatatttttcgtaattttttcaaataagacgaatggtgaaacgttgaacacgaaaatcaggtttgtctttttttcggaagggtggagtatatccctctctctctctataaataccctcctccatggattcgttaccacattctcctctctctctctccctctctcatccatttcaattctctctcttgacacagctacaagacaagccacctcctccctccctcctctactgaaccaagaagaggagagagaaagtagaggagagggagacaagcagacagacagaattgcctgccaagaaacgagatacacacacatctagagagagaaagtagagagagatcaagaacaagaacaagatcaagaagaggagatctgtggcgatggggatgaggccgggttgggtaggcgggctggtggaggagagcttcttcgtgggttgcccagcgcacgagagccggaagaagaacgagaagaacatcttctgcctcgcctgctgcaccagcatctgccctcactgcgccccctcccatcgccaccaccctctcctccaggtttcactaattaatccccctcccccctccttaattctcccctcccatcgcttaatcacgcatgaatcaagaaccatcatccacccagttctttgtcttcttgttgctcacttctttgcatgcatggtctgattttcttgaaaaaggaatggagtgtgtgtgttttttttacctgttcatgcttgaattaattagtcttttcttggagatttggtaggaggagtgaattgatcgattgattatgagctactaatgagagagatagtagtagaggccaagaggagggggtggtgtgtatcttgctttttgttttgtcctgtgctgtcttttcaagtgctgttcctttcctcacctttcttgttctcttctctccccctggattgattagattttggattaagactttgaacactttttgttgatttgcatactagtgggatgatgatgatgcttctcctctcttttgggattatatgtgttattattatttgctaatcttggatgtacttttgcttggttcttcaccattgtcgtcttgtgagcttttggggggttaattctgccaccatttgaggccttgaatttaggggggttgttcatgatgttgattgcgtcctgtaattagccacactcacaatctgatttgtgcaacaatttccatataaacttcgtggataattcttggttctactaatacaccttccttgatctttggcactagatgtagtaatttaattgtggttaaaactgacctaggtaactcattgtgtgggtgaaaggtgggagtagtatagaaattaattgtgattgagattctcttgttgcattacatgcaaatatgcaagagcaaatctgcttcatttaatttgttccttcaatttttttttgccttcaatttgttccttcaattcggatttgtcctcttcctgccacttcctttccctgcatgcatttcattcaactaactcgggtcagtaaaatttgttgggggtgaggtgagtagtaataactccgatgtgaagaggtttgggggataaaaaagctgtgtgagtttttactgcttcacctttggccttacacttgaaatgggcatagtgccatagccttttcacatgttgaattcttctttttcttgtgtcaatttacctacaaagttactagtagtacaagtcacttcaattttcaaaaaattggcaaaaactgattaggtataattgtactaacagtggcaaacaaattctgaaaaagaatcatctgatggggggggggggtttaggagatttcctttaataggccaggttatccaaaatgtcttgccatgaatagatagaaacacacactctctcatagagaatccctgatcccttactgcctctgcaaagcaatgtgtggtggtaaaaaaaaattaaagaaaagaaatggggataatatggcatcatcttagaattgttactgccagaatttaccatatgtgtgtggtgtggtaaattggcgaccttgtctttttttaccaaagaaaggctcaacactgttgttaccccctgcaactgcaaccgtccagtgggccccaccccctccctctgctggctgatactgttcatcaaagccacagtgaactaaccagtgacctcctcctcccaaaattttcttttcatatctcaaaatttttctttcttttcactgctccatatccattggctggttgtgcttcgttgaggatttgacgtttctgccctttggttctgggattattgagctgcacggggcaggggcatttcggtcattttggcaacccccctcccggtcaaagcatggccctgctttcgtacgtactaccagctgcagcagcgtcctattagaagagcctagcgaagtgttagcagtagctgcacgaatcttaaagcacccggatggcctaatcggacggtgttggtgttccccacaggtgcggcggtacgtgtacaatgacgtcgtccgcctcggcgacctcgagaagctcatcgaatgctcctacgtccaggtgattagctactgatcactacttctaattaatcactcatgttccatgtaaattactccctttgtctccaaaaaataacggattttggaaggacgagatatttcctaatactacgaatctaaacaggctcttgtattattagaaagtgtcacatccctccaaaatttcttatattatactaatgatgtcgaagtaggatagagggagtacgttgattagtgatgtgctaatgatctgtaattaacgtactaatgtgggtgcagccgtacacgatcaacagcgcgaaggtgatattcctgaagccgaggccgcagtcgaggccgttcaaggggtcaggcaatgtgtgcctcacctgcgaccgcatcctgcaggagcccttccacttctgctccctctcctgcaaggtggaccacgtcatggtccacggtggcggcgacctctccaacatcatcctcctccacccccaccaccaccccaacaccgccaccgcctcggccttcccccgtttcgaggacctccgtgtcggcgctgacgatgatgctgccgctatcaccgccgtcacgccagaaggacgttatggtggcggcggtggtgggtctagtgataatggcggcggtgatggcggtggcggcgaggtgggggaggtgaagaggaagaagaagaaggggggagggttcttcccccagattctggggctggggagtaggaggaagggtgcaccccacagatcacccctgtcctaagcctaatcaccactttgcccccctagctacatatatgtgccattaatagcagctagctgttaattaattactagtagtagctaagctagcccctagctgtactagctagttctagcttttagtgtgtcatgtcattatagccctatgattagccatgtagagagagatgagtgtgtgtgttaatttgtgtgttggttggttggttggatgggttctttgggaggtaggggcttttgtttgtgtgatctagcttagcttaaggttaattagcttagctagggccacttccaagctaataggcacttaggcagtgttttgatgggagacagagagggagggagaaagagaggaaaaaagcaagcaattctcctactgttacaggcctaggtagctgagtcacaggtatgtggggcccaggttgcatggcttcccctacatgatagtgtgtggctaccaattttgtacttgatgtaacagcagggttacttgcatacacttccataaccacatatataattaattaatatcgttcctcatattattatgccacttttactgtgtagagtactttcatcctacaatgtaagctttttttaagttggatatactccctccgtcctaaaaaaaggcaaaccctgagttttcgtgtccaactttaactgtccgtcttatatgaaatttttttataattcttattttcattgttgttagatgataaaacatgattagtattttgtgcgtgacttatctttttaatttttttcataattttttcgaataagacggacggtcaaacgttggatatggaaacaagggtttatctttttttttgacggagggagtaggtactaagagacctcatcgcttgacctagaacttataagttattgttaaaatttgatttttgaagttgattttgatgttttttagtgtaattttttttagtattagtttctaaatcactaagtacgcttgtaaaaattctatacacaaattactttttatcactaataaaccgttacgtcttataaataatcagacgtaggcaaccaatagacctaagaaagttggtgatattgattagatgaaggtcatgatcggttcagaaaaaaatagatgaaaaaattaaatagaaaatggttgcgattggttgaggtggatgcgtaagcgaagaaatagttttattttagaataaactattgtactagaactacaagaaatagttttattttgatgcgaagttagtagtaaattactactattaattaagtgaatctgtttggtgatggttccagggcatgatgagtaaagtactggagtatacagtacatgtatgatgtgagagagtgtgatctgttgtctttctccgaggaattgtttgtcactttgaccatgcaaaaaaggagagatggatgcatgtgatgcacacaacacatttcccagctccaggccaaactcttcaattgagttgctggtgagaaagaaaaaaaaagaaaagaagaagaaaggagagctgtccctgtggaattgtgctgttttgttctgatgccattgtgcttgcttcaactttgcaatgtgccactgtttgtttctgctgcacagtgtgtgtgtccaatgtccatcactctagagacagatagatagagagagagatgggcagggcaatgctactctcactcatatcacctggatgtcagccataggttgaggaggcagggtgcagctttattaaccctttccatcccttcttttgcaggaaacgaaaagattatctcagctttgaagggtaatctcaataacaatgaaattaatgatccatgtcacgatcaacgagtctaaagttgcatgattagctaagagcaagtttaatagtatagccaactattaactccaaatcatctatagtcaatgtaatagtcaattaatacaatagttgcttactatattattaatatctggtctcacctgttatacacacgttacgtcttgaaatctgtgctgcagctggctacagatctgtagcccgctgcttttctctctctgtttatagtctactattgtacctgctctaagctcatcagtcactacagctgattttgattcgatctctttcagtgtctggattctggcaatccaacatctgaaattaataagagagcaactggttgtcatattttactctcttggaacatctccaggagacgagcttgttggagttaaatcttaaaatcatgaacttaggctatgtatgatcacctaatttctcttatgctgaatttggtggtgtactgaccgaatgaagaagccatatggtcgccttagatgcgtcggtgtagtggttgtaaggcgccacgacggcgatgggagtttgcctttggctaaccgtaagtcgatcgttaccaacgaacgggtagagatcccttaatatctgtgtgcattgaggggatgggggtgagtccgttacgtagatagcgcgtccgatcatcgcgcgagagagagcatcatgcgctcgagaccgagggaatcggtcctcaacattaggcgcgtgtgggcgtggggtgggccaagcccattggcgcaattctctgactcggtggctagagctatcaggttagctatattttaaaacggacgaggttatctatcttaatctactatctaaattttccctagctagccatctttgctaaagaaaaagggggacaaggggttgagtggctgacgagtcccactaatccagagcagtttgttggaatgcataggaagtaaagagcaatcttttggagaaccaaatggtgatatgggtaatgaattttgccaagtcttctttcttttttttttttgccaagtcgcttggagatgctctttttcaccaaggtccctagagccaaaaaccctagggagcatccaaaatactctagggaaaacgcttccctagggtaaaccctagggaacccgctctagggatcacttctacgggaaagcctcggttccctagagtttttatgtgaaaacctagggaaaaattcagttccctagagtttcaaaccacagggacaaatgtataggtggcaacttcatctgacgtggaaagtagcttttctttgttctcatccatatttggggaaaatactggcatttatcgaaatttaccttttttttatttttttgctttttcactacctgcttttgcctcaatttgaaagaaaagaacaatcaattgtagaaaataataccattctattattaacaggaaacactcaattcatacaaactgattctccattttacatagtacttttttgtagtacaacaatagatctgaaaatttggctaactattcctcttataaacacatgacaaacttcaggatgtgctgatgtatcgtcgacaacatcacagaaccaaacaatgataaaaaaaaagaatactagttcttgtggacgaatgtaaccactgcactctagcttgctgctgcaactagtacagtagaagcttgagaacggctagatctgagctgaattattaatcttgttgttctccaacgtttccaatccatgcctcttccaaactagtcccaaatatcatcctcaatagctcaaaatctagataatctgcaaagggacacatacgaaaagtataagctaaattttaacagcactcacttggatctgtacttccatgcgttggcatgcatcacggtggaggtggaggagcagcaatcgtgtggtgcccgccggttgccggagctcgctctttggctgtaggctaccaagaaaagacagtagaagaaatcaggacacaagaaacttggatctgaacagtgcatgaatggagaagatggaagtgcggtgggagcaacgactccgaactgccgtgtcaggagcagcagctgtcaggtgcttgcttgctgcagccagtcgctggagctcgagcttggactgcaggcgatgaaatggcagccgctggacgccggtgccgaccggctaactccttggatgaagaagaagatagaacaagatgtggtctgccttgagtcatgggagtagataaggtgggaaggaaaaaaataaattggcagaaaatttgtattgtcagggtgcgctttgcttggcgcgagtaaaaaaaatctctgaaaaaactttgggaataatctattcccttttgtgctgacatggcacaactgtgtgtccttttcacgagaggttccctaggagtgcagtcaaactctagggattcagttcgttcccttgggtttgcaaaattcactctagggatattttgctccctaggattgttttaaaagctctagggaagattttaaaactctagggaacccattgaattctagtagtgatatgaagtagtattctgcttgacgttcatggcagctaatgcaaaatatactacagtctgatatacgctataatattagtgttgtatctgaataatggaggctctaatgtcttgacctcctcaggacatgaagaagacagtttttaatttcaaaactaaatcttagttttgatcaactttttttttatcaatacttaaccttggtttttatatcatgaaggtagaaatgtaaaagtgttacattaaaatattttggttacactagcccagcttatatgctagaccagccaaatagcaaatcttctggctgttttggtttaatgcgagaatttgccctcccaaatatttgacaacttaaacagtagttgctacatattgtggatgattggatgatacaactcaacttcactgaaatattgatcaagtgaaatcgcctatctatgaaaactatacaattgcgatgatctaactcaacttcactaaaatattgatcaactactgaaatcgcctaaggtttaacactaccaataatttaaacagggtggcttgccaaattgttgaccgttgagtcaccgaaagagaaaaaaattggagttaaacaatttgactcaggcaggtagttttccaagtaccgattcaattcgattaaccggcaattaaatcgaacccttgattaattgagtttgtcaactccgaggcgatcgatcgtatcgtatcgtatcgaatcgaacccaacacaaacatttgggagtgtggtccctgtcggtgccacatgagccgagacaaagagcaaacaacaaaaatccatttaggtcaattcgatagcatttcattcaaaattcctgtcatttcacatgcctcgacattcatttccaaaccaaatcttgtagtatatatattcaccgttcgataccaagtccagccacaatttcaattggctggaccaagctatataaggtttgctcaaccaagttcatcagcaactgagtcacatgaagatttgatgcaaggcataattttctataataatatttcccattcatgtgtaggaagaaaaattcttttggattgggcaaatttgacgaaattgttagaaaaaaaaagatgaatttgagctaaattattctgcgaaaaatcctaaatgctcctttggaagttgggacaaaggtttttcaagaattttttttagatacctttggaatattttcctatatgtctctttgaaagaaagggacggggcctttgaaattcctatagaatggttagatccataggaattttgaagaaaatctagcgtaacctctctaagcttttgaaaaattttctttgtgcatgtcacactctctcgaactgttgtattgtctgtctatgaagcatccaacaacacaattgaataattcatgcatttttcatattttttttaatattgcgctcacatatcaccctatattccgtgttattctattcctacattttcaaatcctatatcctccgttcctaaagaatcaaatccttgctatgaatatgagcatgtgcatgttcaaatttatagcaagaatttgaaacttcttataatttttttaagaacagaaggagtacatttcaaagtagtattttcattattgttagatgataaaacatgattaatactttatgcgtgacttgtctttttaatttttttttcataattttttcaaataagatgaacggccaaatattggatacggaaatccagtgtttttttttggacggataggttagttcttagtgaaacattgttgtttttattcctgtactggtacaaatggacggagaaaattaaaaccaacgtcttgcaatcccttcaggggagtacatggcaaagttgtacaacctgtctatggatgcagatgcagatgcagatgcagatgcagaagcagatgggtaagctatcttctcagcgtccgtaccgtgtaatttaatgcgtccgtacaccaatggatcgtgggctttgaacctgcaggcttatcctccatgtcccatgtctccatgcagcatcacgggctatataatccttcttcctctgaccacaacctccctcaactaatttcgtctacaatctagcactctatcaatgttaatgatcttgcaaacaatatggaaaatggaaattacgaagcgagcgcaactcagttggtttgattcctcgtggtgaaacctgattatccgaattcaattacaagattttaatatggctggttgtatttatgcgcgcgtagttttaagcctacttagtatcaatatatttttcttacaaacaatatcaaaattaatctttctattttctaaagcaatttgccaggggttgctgatctactgtaatcgtcaatgtggtgaattgatgttgttattttgccaagttctcttaattaggggagtattttgtgactctagctagaaaaagttaaggcattctttaatttttgcatcatggcttgtttcttctagaggtttaagtggaactattgggtcacactgacagttttgtatagtagtaattaatagcaatatcactaattcactatactgttttaaggatgtcaagtctcatcacaacaccgcaagctatattttcttaaataaatgaaagcacaggctatatgtatccccacgcacatcgactatactacctccggccataagttttaaaaatgtttaaactttgaccacaattatctttttaataaattttattcaacttttgaaaatggtagggttagatttacatttagatttatctttaaaatattttcgaaattgtaatttacacatatgtatttttttataaattttataccgctagtagtaaacaattaaacaaaatggtggccgagctttttacatatgtttttacgtgtgccggagtcggtcgacattatacctacactcctctactcatatctcttgtgacgatacaagatactcatttccacaaatctcttatctttcatttccacatatgtagaaactactataaccccttatattacataatataatctaccgtgttacataaaaaacaagtttcttcatggtcgtggagatatgcaaaattacgcttagagcatgttttctgccaggtgcagtttatcccagaatcagaaattctcccgaacagtttaacttttcattcaaattctaatacactgtagtcgtagaatagaaaaaatgaactagaaaatagattctagaaaaacccagcttctccattttatcataaactggctactaactagctacttatcagaattttaagctcccaaaacaagcgtttatttacaaccagaagaaaatgtattaaactaaaggtattttaaattaggaacttagcttctcaaacaaccaatgtaaaattcattcttatggagatttgaactcatcaagaatcttggaatgctacttacctcctgtttggaggagcttaagattctgagaagcagctgctgaggaactagctagcttctagttcatttctcagattctataactacagattattagaatttgggtaaaaagctggattgtttgggggagcttctggcaactggagattctaggagaagctgcaactgttagaaactcctccaaacaggcccttagatcactgtaagagactgatacgtggtcgatagatcgtgacagtgacgtactctctccgtttcacaatgtaagtcattctagcattttccacattcatatcgatgctaatgaatctagacatataaacggaggaagtagctacttattctttgtgccagctagcatgcatgtgtaaaccaaccgtacgtgcacggtgaggaccagaaatcatgcaacagctaacgtacatatatatggtccagtgcgaccggccgaccgaccgaccgacccagtcacccagccacccctgccaaaatccaccccgatttcgattcgccaccggctctggtcgtgtcagctacaccgtggggaaaaaaatcaaacaaacaaaaaatatttgatacataatttccattttctaacttttgggactatcgtacgtctttaaaaaaaattgtgcaagttttctttatggaaaactttatagtacaagcgtacaaggaaattgctattacaatataacatgcacgtaatattaaaaacacacgccggcagagtgatattatagtaactttccgaaacccgatattatttctacgattttctatttaaatggcaccatttcaggtaaaaaaatccattttaattggctagaggacaccttactttatttagatgggtgaatggggcaaaatgttcacatgaatatattaaaccgatatcacatagaacaaagctttggccgcgtaagcacggaagcctatagataagagagaatacacaaagaattacaaggaagagaaacacaactacgatgtaaggtgaattggaagcgagtctgcagaccgataaaatatggtggcttgggagtatcaaacctccgcataataggaaaggcgctccgactacgatggctttggtatgaatggaactttcactgacaagccatggatcggtatgccaacgccctgtgacgaccaagacaaggaactctttgctgcctcaacaacagtgttcattggagatgaaagaaagcattcttctgggaatctccatgggcatcctacagcacgctaaaggctatggcacctaacctctactgccactctaagagaaagaaaagaacggttgtcaaggccttagatggcaataagtggatcgatgacatcaggcacaaccttaccacatcactactgactaaattcttccaagtcttcgagctgatctagtccttggacactaccctaacccaaggagtggaggacaatattcgctggaaatggacaccgccgggaacctacactgctaaatcagcttaccagatgcaattcctgggtagcacatagtcagcttcagcaaacgcggtctggaaatgctgggcgccgtccaagtgcgaattcttcacctggctcctcctccaaaacagaatctggacggccgatagacttcaacagagggagtggccaaacaactatttctgtcaactctgcttcagaaacctcgagacggtccacccctcttctacgaatgtccaagcacgaggacaatctgggacactgtagtgacaaggctgaggattcctcagttacgaccgccgaattagcccaacacatcttcccttaaggattggtggatccagaccatccatgccatggctaaggaaaaaataaatatggtcaaatcgatccttattatactttcctgggaaatatggaaagaaaggaatagcagggttttccacaacatcgaagcttcattacaagtaaccattaatcgggcgattgatgaagtatggctatggcgtgcatgtggaccacgggcattcaatccctgcttccggacacccgtggaagtacaatcggcaatttgtagatcgtgacatgtactcctaatcccttccctctagcagtcccaccctacctctctcgtttttcttttgtaatctctagcctttgggctattgtatagtgtttctccctactttaatacaaatacaccccgtggggtttaaaaaaaaagagagaaacacaactacctaaaaggacacttgagatacactaaaagaacagggagagatggttaacagaggggtatcaaaaaaattttcaccaatagaatcacaaaaccaaaaactcctacaacacagacactcacaacgcacgcacacccctatgagcatcttcgaagactaagccggcaaatccatcttgaagattgacgaagtcatcacagacgcctcgctgtcgacgagtgaaagtacatggggagtcaaacccaggacctaagatactagctactaggctacagaccctttcgcgccacatatcatacttacttgacatatgtctcgtaagcattcatcatgctactaagactccagcttagatgatcgatcgatcgaaattaaagctggtggtgtgtacgtgtttgtgtgctggatttttcacattttggtccttttgaaaaacttatttcgcaaatagactcctagaaaaacttatcccaaaaatggtctaagctggctagagggagtgcgccagagtggctggcgccccccccccccccgaaattttttatttttgttttatttgtttgatatttttttcacgcttagggacacacaagaaccaaccatagaaaaattgaactcaaatggacgtaatatgtgacctgtagaatttttcctctcctctcttctcctctctctccgaactagtgcagaggagagagatgtgcaacttttttttattttatttttttgatatttttttcacacttaggaactcacaggaactaaccatgtaaaaaataaactcaaacggacgaaatatgtggtatgtggaattttccaaagctccaccgaaaaacttatctcctcgaaaacacaatcttgcaagcggaatttggaggttttagtatcgctgaacccggtgaagcgggggagaatcggatgtaactttttctgtagatgtccgtgcatatattatttgcctgattccgagtccgtaagataaagttacgcctgttttaatagatgacatattttgtccgtttcgatagagttttggaaaattctacatgtcacatattttttccgtttgagtttattttttatacggttagtttctatgttctcctaagtgtgaaaaaaatatcaaaaaaatgaaataaaaataaaaaaattgcatctctatgtactgtttaacttatatatgtcatttcatgtggttatattttgaattagattaagtaatttcatatagtggtagagtgcattatgtttaacatgctgatcaaagggttttactaaaagagttatggtctaattttagtgaaggtgcaaagtagactaagtggtatgctagctattttcagatttagctaagtgatagttcgagtttaaattttttttggtggttggttgtatcgtgatcctgagtgtgaaaaaacatccgacaaaataaaataaaaatgacaccgttgcaactccatacagaaaaacaggaatggaggcggcggcgccagccatgctggcgccctcctccctggggcggcgccagcatggctggcgccctcctcctgccacgtcggttaacgtgcgccacggtggcaggaggacggcgccaaagaggctggcgccgtcccgttggatgacggcgccagccactctggcgccccaaaaaagaccatttctaggataagtttttttagaggtctatttgtgaaataagtttttcaaaaggaccaaaatatgaaaagtccagtgtttgtgtgggggccgacataccggcgacacgactgatccaggcattgtgtgcacacatgcatgcccctgcatctgcatggagacctttctcctatatgcatgtgttgcatgcaatatatataatgcatgcgtgagagacaagagctgtggccatgtctctttgccactatatatattctctctacatgataggcggagcaagaaaattggttcacgggtattataatacactaatattattcaattcttagtgttatcttaaatgtccctatctttattgcctaaataatacaacatggatttcaccgaaagttgtcagggtcagctaaccaaggcgattgtattgtaggctacaatacaatgtgtacccttttctgcatatatactatccccgattgtactgtagctccatccctgtcatatatatatatgctatccctattttttttattgatgttgcttagtcaaaattgaactaaacattatcaaatatttggggaatgaagtacatcgacacacttatgcttgcatatgtgtaccctgttagtatttcaaaatcgacaaagtatatttccttgatttttttcaacctgaaatctagggcatatttttttccctttctaaacctacatattaataaaaaaatgtttaaaatataactacatgaaaatatttttgtaaacaaatatatgtggggtgtcagttttacatgtcaaatatagtacttatgcaaatgtatatacccatttaagatttcaaggtttgatcaaggataccttcaaataaaatctatttgtaaattgagggagtacatgcaggataaataataagtcaataacgagaatatcaactaatagagaaagggcctgtaacctagtggttacaagagcctcagtagcacctgaggtcctgggttcgctcccagatttatcggcattgtgctttcagtggtaggcaatgtacccgtcgacagcgaggcgcctgtggtgacttcgtcctcttaatgatgtttatttgatgattctcacacatctaaccctgcaagacctaaagaacaccaattggtcaatttaatttcttttgtgtgcaaggcatatctagatgcatgcatggcacatttgtgtagagaaacacataaaagtattgatcttcacacagttgtacgaatttaaagagagcctgagccaatttctccatgcatgttgagtctcatcaagggtgcctatcctggctagctactattggctgctactgcacagtaatagtatgagcatccatccatccatccatcccctccaaagtccaaacaatggagatcgttgtggcccatccccgatctatgaattggtcgaatcatgcattcattcatgtaacgggtgcccacacctcccctgtgcccaaacatggcctcatgttttcttcctttcaacatagtgcatgtggccctcctagctagggctttgtttccttttcgtgccggctactgtgttgtgcggacaagtcgaacagtgctgttgtgttcaggaaaccgttagatccaccgttgtactttgacataacgcacacgtgcgggaatccagatctgtgtcaggacacggtcgctagattatagggggtgctacattgacattgtcacgccgacaagtagaatgtatgaatgtgctacagacgtcattgtctttactgcaaaaagaccgtacctagaaacatggcataatgtattgaatcaatgacgttggataaccgtcggatatgcaaaatagggacaaaacatatgatgggcccgcctctacccaccatcactttatttattggatgaatattgaataggcatgcatgatgatactacctccgacaactcaatatacaacgtagtctaggacactaggtagcaataaaaaatttaaaactttggtccctatatttatatttaataataactagctatatataaaacgcaatggtcaaaacacatgattgaatcaagaccgaaccaacaaacaaacatcctttctaagaatataaacacaacgacatgtcttcccattgataaaaaggatcaaaggaacttcaatttagcgcgggctgttgaaattctattggttttcattagaacttcaatctcagttttcattatataattattcaccaaagagctaattttggaactctgtgtttcatggaaatcttcctcttagctgcttggaatatttggaagcacaggaataatttggttttcaattctatcgtgccctcgacctcaagctggaaatctgctcttaaagaggacctaagtctacatttacttagacttagagatgaccaaattctttttgctcaatcatggatgtctctattgtaatttctttgtaactttgtactcttatctcttttataatatataccgtaggggcttcctctactgttcacttttcaaaaaaaaagggatcaaaggagagttaagaatatacacatgaagccatgttttcttattaatataaagaatacttgtacatttagactagttacatagggtggtattacaacgaaaaaaaagacattttttatcgtagatgaaattacttttcagagctataaaactactcatatacaattagataccgagttcagtatatttgaagagcaaccccgtcgatatttattttctggatcaacccctgagttcattctaacctatatattatcctaatggatgtacaaagctgaagttgggtctggaatttgggtaggtgtagttacggtgatgcaaagagagtgtgttctttgccaatcttggagaagcagcagtaactagagcaataaccaacggcagcaataatatgtaagtggtagtacagtagctagtaccgatttattttgcagctagccgtccaggggggccaatgattgacatggtttgtaatgccgtgcaacgcctctctgaaaaacctgcagaatctaacctgtttggcacgatgaattcatccgggccggtcggtcggtcgatcggtctccaatctgatgcatggtcttgtccatcgtctgctagtattatttgatcatctcttccaatagatctttctctcatctctcaataaatggcagctttaccacttgcaagttgttgttgcaacacctaccaatcacaggcttacagcttactccctccgtcctaaaaaaaaaagacaaactctgggtttccgtgtccaacgtttaactatccgtcttatatgaaatttttttataattagtattttgactgtctgtatccaacgttagatgataaaacatgattaatactttatatgtgatttgtctttttaattttttttcatattttttttaaataaaacggacggtcaaacgttggacaccaaaacccaaagattgtcttttttttttttttttggaacggatggagtatctctctctctttcacaaacagtttccatatgacagaaaacagtgattttcaccgctgctggctactgaacatttccgctgcttctaaactgcacacataccattatcttataaaattgcacgtatgtacctcgaatttttgttttgtactttgcagataatttgttaacacaataactatgtgtacgttagtagtagtatgctacccctgtcctaaaatacggattttggcaagacaaatatatggctaaacttctttatattttaggacggaggtaataagatagtattccctccgtcccacgaagactccatttttcagtttttggatacaacgtttaacgctttgtcttatttaaaaaaatttataattagtattttttttggttagatgataaaaacatgaatagtactttatgcgtgactatttttttctcgtaaatctttcaaataaaatggacggtcgaatgttggacgcagaaacccaaaaatgaagtctttgtgggacggaggagtattaaatgtgtggatgacatgtagggcctaagcccgatgccccgaataacaatcacgcagcaatgtaatttatcaatttttatgaattaccatatatctaattcatgtaggaaatttcaaaaactttaacatgagaaagcataatggtagcatatcgtaggggaggttttcgaagagttggatatttcattaacactaaatgcctaaaaatatgtcactgtataaagcgattaaaatagaaaaagagaatcaagaaacctctacaacttcaagagctggttgggggttcaattttctcacagtgatctgatgcccccctataattgcagaagtgggaccagtccaaagaagcaggtctttgtaagcaggctttttccatggcatgcattgccaagtgaggagaggagaggaccaccacaatccacaagtgaggaagactaggtttaagaggaggatgactggatgagaagagatcaatggaagaagatctagatagatagctagctagaatgcttgatagataagatgatagaaataattggccctggaagcatggaccatcccaaactggtggtggtttttggagcagtgcacaaccatgtctcccatgtcccatgcacttggagttaattggtcaccaccaacaatgcctgcccatatattgattgcttttcatccagcaaaaatatccactacgcaaattggaagtccttgttttgaatgcgagaaattttacatgaggttaatttcttaactgtactatttttgtaactatactattttcaacaaaattcttggttcacggctcttggaatagtgtcgtaggaaagggttggattgccgcaagatgtacgcgtagaatcttggagtctcacatagcctagggtttgaaattttgtaggagatagacataggggaggggacagaaaaaaagatagtagatatgaagtgatgtgttttgtgtcatgttgttagtgatggtgcagtaaaaggcccaatgatggagggaagaaagctggggaacaaaaggggtggggttctaaatggcagtgggctttgagatgggcccccatccttgaggctgcaggagaaagggaggcagcccccatttccccatctgtaccttctctcagagcccccttcaaaaattcagatttcagaaaccccaccactcccaccattattgtacaatcactttgaccattggtctccttcctcgtcctcttcctcttcctcatcctctctccgcaatcatggagtgtctacgtgtgatactactatcgctctacgtacacatctgctaattaactatctatgacaattggacccctgacaattattgttctaacaccggctataatatctaaattttagtcatgcgttcaccattgtctttctggaggaaatatgtagtgtaaaccatatataatggaaaactagaaactaccgttaaatcaaaaaatggacattccagattcgtccacccagtaaaatttttacttatgagtaaatctgcgagtaaaatttttactcatgatgatgtgaacaaatctcaaacatctatttttcgatccaacggtagttcgaaatccatatacagaaaacgtggttagtgacgtgctgtaccaccataaaaagctcacatgcgtgcttcttggcacgtgcaagcagcagaggattatgtggtttcaagtgcctccagtgcattgcaatttgtcagcgtgtgggcctgtggaatctctgcagcagtgtacaacaatctttgcattgctgatgaattaattatctggtccaactaacataagttgggtccagcccaacgaatccaacatttcagcctggcccaccaagactaggaaggaggatttattgtaaagtacagaaagagggtcatgatcatcagctgcccaattcccagagtatcttcttttactcagaaattcacaaagaactataacatgtacaaccaaaatcaaagcatgctcaatcaactacggggagcaggcgtatgcgaagacaatttttacatcttcattcttcgtcggaagtgaagatttcatgatgatccatcaacagtcagatggccgctagcttcatgatgcaggatatgggcaagcgccaaggaatggttccagtgctgccagatgatgtctcaggaagctgtacacagattctgtgctcactgcggttatccgagcaaccatcccagtgcccttcagcaagaggaagaaaaaaagatgttatcacatgtttctagaaaattgtcgtggtagtgtcaggaaagctggggaagtaacaaaccatgcgaccgaatggactacaggaggcgatgattggaggcctctggggatgtaggggttgtgatcttgtcgagtagcgacctccggcagaagtgggagggcgcagttgtacagacatcatcttttttacctcatcttgcatctgatcttgtatgtgctttaactttggtctgcaagggaaagtatgccactgattcactgaaccattgtctgtaagtaatccagatctagccatctgggattccactagtaacttgttagactgagtgaaccatagtccatagttcctgattcccaacaattttcttcgaaatctgaagtaaactatggtccatggattcctctgattccctacaattttctagaaattctgaaagatcctcaactagcataattgtagtaactaccaaagacaaaagaacacggttgattatgtgaaaaccgaagcagcacataggcagtagccaaagtcatatctgcaaaggtcgagaagacctgtgcagaaggcaaatttcagtgtttgatggccttaccccagcaaaataaccattgcaaccacattgtattcctgcattcggtcagcaatactaaaatttgagctctgttccaataaaacctgctcagacattagaagaggttatgtggcatggcattaagcacaaccgatgattagagtggggatgaacaagattaatcaggcaaatgttaggagaagctgaaaggtgagctcttaccgagtcaataaatagaggctgatcttccaaaagaatatggttgatgctcttgtagaagctgaaattccatttttctccactctcgtaacgaccacttgtaaaccagtctacaacgactaagtttgaattgggaaagacatgaaacacttgcttctggtggtatcgagccattgagaagcaggttacaggatctggaataagtgcaaagagtgcatcttctccaactcttgcctactgcatataatgaagaatcattataattgctattttcttaaaaaaaaagttgaagttccctagtaagaaattctgaggagtatcgaaatttcgaaggagcattacctctagcacctgctcagaacattttgaatccacggccttgtacacctaaacaagcacttggccattgacaaacataaaacaatcaatatatatggttcgttaaaaaaaatcaatatattcctcaagaactaacttttttcagttaaaatttcgataatgaagtatgttattacacttgactacgggtgcattgctataacccagctgctgtgtcaaagacgcacaaagcccaatatcatgttattacaatagactagtttaagtcctaggttgcatttggtaattctaatagcataccctacacttatatggaattgacatcaagacccctctagctctagctgtaacattatctaagggtccctttgaaacgcgggataggaaaaacgcaggaattgaagttgcatgtttctctaatcctacaggaatgaaaaacacaggaaagatgaagaggagccctttgatagcatcataggaaactaacaaagcaaaggaaagtttccaagaggttgggcctcttgcttacttcatatggaatattctctatccttggctcgatagaaataaaaaatcatttagaagattaaatccttcaaaattcttatgacaatccatcatttcaaaagggaccctaaagttggcaaagattttgcccttctttcaaaaaggaaaaaaaaatacggggggggggggggccctaaaagtgttctagctgtaagcatttatgagaaacattcgttcactaacctatgtcattttctccaactaaggaaatgtaaacagtatttactcggccaatcgcatgagaacaattgaaagaaaaaaggaccttagtggaggcctgcgtggtcatcgccgccgcgcacccgtcgccgacggccaccgtgcaggagatgatgtccccctacaagcacagcccccaaaaaagaagaacaaaaacgcatcagacactcgcactcacgattgcctctctctcgagaaaggaggcaaactgttggttggttggttgattgcaatccgggggaggaagaggaggcgatgcggcggctcacggagacgatgccgccgccgtaggtgatggcgtagagccacgcggcgccggaggacgcgcgcccggcctgccagaggatcgccgacgaggtgaggtcagtggctcatcgcagcaaacaagcgaaggcaatctatataatggatggaggaggtggtggaaccttggagggggcgatgagcttgagcgggtacttggcgaagcacctggtcaccgctgacctccccctcaccttctccacccgcaccgcccctgtcgccgccgctggcgccgccgccggcgccattgccgcctccgcctccatgctctttctttctttcttttttctttcttttttcttttttttttagaatgaagtccacgataacgagaggtcaatcacgctttcttcctctcttttttttccgatataagataatagcacggcccactacgtcacgtgtgggcttgggctgggatggggcaagtgcacctgtgtaattcaatattgggccattattctactggacccaaggcgagatcgactggtcctacccaagagtgaaatgatatgcatcggttctaaaatcgtttttggtggtatcttgatactctacattgcattttattttaagaaacgtagtacaaatttttggacttcatatgcgcggagcaactctacaagattgtatcggtatatcttcgagattaataagtcactataagcatctcgctgtcgacgaatacgtcgtgtatcactgaaaaaataattagccgtaaatgcggacattaggacttgcaaactagattttatttgaattcaaaaataaaaatgatctaaatgcatttgtttcaggtatcttcaaaatcaatgttaaataaaacaattagcactagtgagtggttttctcttgacaaatcttttttatactatattattataactctattatcataattagctatatataattaacataaatattaaattaaacttaaaaattatcataatacctcgttagatccaactttaagagccggatcactttgatgtcatcttcaatcataccatttttttttataaagttgtcaaaaaaaatatctacgtttagtttgttgctacaattttaacattatcaaaatttagtaagatttattttggctataatctgaacaagtcctaaaataaaacaataatactatactcctacctaaccaaccaacctttgcccctacctaataacgaaataaaataataaattacctaatgcagtgggctggtctggtgcatcgcccaccgatttcatcgtgccgtgactcacatgccgcgccgaccgggacacgttgtgcggtcggtgtcggtggctgccgcgctttccgaccgagcgcgaccgcaccacaatatcacgcccaggcgcgcaccgagccggccttatccatctctggccagtgaccaccccgcgcttcacttcgcttcacttcggcttcgcttccatggcgatcaccgcggccaccgccgccgccgccgccacgccccacccgtggcaggccgacgcctcgccgcgtcgccacgccgcgtgccccgctctccgcgggaggaggcgcctccccgtcgtcaggtacgtattacgttgccttctgcggccttggggggcgcgcgcgcgcgcacgccaggtgctcgaccgattgcctctctgtgcgcgggtggctgagctgtggtgtttggggtgggggggggggggtgatgttatggtggttgttgttgttgttgaaggtgccagtcgtccagcgtcgacgacaagcccaagtccaagcggggcctgctcgacaacgccagcaacctgctcaccaacctgctcagcggcgggagcctcggcgcgatgcccgtcgccgagggcgccgtcaccgacctcttcggccggccactcttcttctcgctctacgactggttcctcgaggtgatcaccccaatcaatctgtggctcttgcattagtatttgcaatatcccacgcacatttcatcgctactgcgctacttcgttgcacttgctaatttttttttccacttactgcaatcacacatacgtttcgttctcttatgatcaaaagcatgtttgtccactatttcatctccaaactacgttacatgattacacaaattttaatgctatgtacattttattattgactgtctgaattttatggttcaacgccatttttgaactccatgttcaaacttgactgtttgtttagttagcatgccttattgccttaaagttgttttgcaattctagcgatttttttaactccacatcacaaacttcacaccctttttttttaattagcacgccttcaagtttttttttttgtttgcaacttcataaatgcattgctaaatgtacatttcaccattcataaaaacagtgaagatatatgccaatagttggcttgcgtccctgctgttcaggtttatgcattatttcttttgattctcattagtgacttacattaccaatttaccattaggttcataatcaagtagatatgtggacaagttgtgcaacaatgcaggggcaaagccaggataaatggtcaccggggtcagtgttaaccagggtttatgctttcgaccaaaaccgaccaaaaatcatgtaattttgatgtttcgacgtgggacgaaaagtatattctgagtgaaattttgaatgtttttggagaattcacggcaaaactatatcaaaacttattaaaatttggtgaaaaatgtcatatcgctacattgtaatccaacattaaatcggaaatgtcatctagtttgtaattaatgatctaagactatacataatacaagacaaaattaatgacaatatgataaaatgaaatgtctacaaatttgttaaaaactatacattattaatttgtaaaacacaccaaatgcaccaaagattatcaaaaccactaatttattgccttccgttctgctagaaataagatgatataagatgtcaagatgtgcaacgccggtgcgggacaaagtgctcgaaggaatacgatgacgcaacaagagtatttgtggagttatttttggacccaaatcacaatcgtatatgtatattgggctgacgtataaatcataagtgctagctaattttctatttgttgtttgttagtatcgttcctagtcactagtttggttttgacggaacaatcagcaatatcactggggtctagtttttctcttcgctggggtcatagatggtaaaataaagagggtttgagaggtttgcaaaacgtcgtcggggtcaactgaccgctatgaatggctgtagcttcgcccctgcaacaatgctaacctatcatgatttgtttgcagcatggctctgtgtacaaactcgcttttggacccaaggcatttgttgttgtctccgatccaattgttgctagacatatcctgcgagaaaatgctttctgttatgataaggtattcttctaatgcacattttatgaatatcctttgttggctcaactgtaggtggtattggatcataattttttttttaccatgatggctgtcaggtgtcagctgatttatagcatgtgctctgttgtagcaactgaattttacctgtattaatatatatcatggataactaatgttgctactagactactgtttagtttgttaggtttctttcttacatatttatgtacttgaaatcagggagttcttgctgaaattttaaaaccaataatggggaagggtcttatacctgctgaccttgatacctggaagcaaaggagaaaaggttagaaaggttggatattgaatcttagtttgtgcacttttgggtttgttctgagtgaaatgttgcatgtttctgtgtgctcatctaaggccatactgtttgactttttaaaggtataaaaattgcagttgccaatagtaatgggcctatttatcagacaattgactgatataattaaactatttcctgcctttttatgaaccaaactgtttcatagcctattgcggactttatgtttgtatttcactcaatggcatgctcatggtgcaccttttccaatttctttgttgtgcagttataacccccgggttccatgccttattcatagatgctatggtgggagtatttactaagtgttcagagagaacaatatttaagcttgaagagcttattgaaaggggcgaacatggggaaaagtataccatagtggaccttgaagctgagttttctaatttggctctcgacataattggcttgggcgtgttcaattttgattttgattcggttaccaaagaatctcctgtgatcaaggtgagcatcatataatacctatagttctaaacctctaatatatgatggttatttcttcacaagaattgcatgcgtggtaatagtctggaacatttgagtatgttatggagcaatgtttatgtcggacgtctattgttagtagacatgaatacatgatcacatggcatgcctttctgctattttctcttcccttatttatgggattttaatttctttttcctgcaggcagtatacggaactctttttgaagctgagcacagatccactttttacattccctattggaatcttcctttaactagatggatagttccaaggcaacgcaagttccacagtgacctcaaggttattaatgattgccttgatagtctcataaaaaatgcaaaagagacaagacaggtttgtttgaactgctgttctattcatacatagtgcatgttttagatctagtactggttttgatgtttcacaaacatgaaatgtaggaagctgatgtcgaaaagctccagcaaagagattactcatcattgaaggttggctgtggtgataccttactgtgtttgttcattggcgagcaccacatttcgttgttatgacttatgaccaataggttcgttttccatcatgcttgtaggatgccagcttgctgaggttccttgttgatatgcggggagctgatgttgacgatcgccaggtagtcatcaatattgttgtgaacttggtatactatgacgcctatttcttcccacacgtggcaaataagttgacaacaatacatgttttgtgctagcttcgagatgaccttatgacaatgcttattgctgggcatgaaacaactgctgctgttttgacatggtctgtttttctactagcccaggtatataagtcctttttgtaccatgcatagttcactagttatggtttactagttgggttgggtatcactgtatgtatgtaccaatcatattctaatatggtgcagaatccctccaagatgagaaaagcacaggcagaggttgattctgtactcagcaatgagacaattaatgtggaccagctcaagaaattggagtatgttacctttcatagtgccattcctgtgaattgaactgtattttagttgttctatacaaatattttttgagaaataaattggctttgcgctttcacttgaatgtgcttaggtacataagactgataattgttgaagctcttcgcttgtatccccagccaccattgttaatcaggcgtgctctgcggccagataaattgccaggtaatcttgtccctgaagtcttcagatttctcctaaatcaaaagggttatgttaaagtcacaagttagttaggtagacacatgccggatattgaagggcatgtggtgtgatgattaaagttctatttattggaaagggatacatattaacatatgcttctaatcttctttttctcaaagaaagtatgaatggaaggatgatattgcatactcataaaacgaacgtatttgttaatcttcattttatcgtgattagcgaaattgtcgctgatcaacatgtggtatcttaatatggtgggttcgttttgttatggcaaagctgccatttggcaatgttctcatactgagccacaatttgcagtgtcttgagcaagtcctaaatgtttgtagtgtgtcgtgtactcatgtccccagtttgcctatgaaaatttcatgcacattattcataggctggatgtttttcctatatttacttgtgtggaatttatagtttatttacaattagcatggtgctattactacattggttcagccacattgctttacaatgcaggatttttctgtgttctttagttcctatcatttgtagtgatgaattatgtttagtaatcgttacatttcgttaatgaaatgggagagatctctctctgtttcaaaaaaaaaaaaacgggagtaacaggaagagtatcttgctttccaactttgttaaatccatgaacatgcttccctggatccttcaatcccgtagtgtcctaaataaactatgaacattgtaatttcctactgattatctcatgcccctttgtccaggtgggtacaatggtgcaaaagaaggatatgaaataccagctggaaccgatatatttctttcggtaagatggacagttgttagatttaggatagtaattaaagctatacttgtctcctatttgagtctgttccacgacttacggaaattgttggttctgtagatatacaacctccatagatctccatacttttgggatcggccagatgagtttgaaccagagagattttcagtaccaaaaaaggatgagagcatagaagggtgggctggttttgatcctgaccggagtcctggtgctatgtatcctaacgaggttggctagtctcctttttttctctactaccttttagatgtccttttactaacaaattgacaacataacaaacctgctgttaccagattttagcagactttgctttccttccttttggcggaggaccccgcaaatgcgtgggagaccagtttgcactcctcgagtcgacagtagccctggccctgctattgcaaaagtttgatgtggagctgcgaggatcacccgatgaagtggagatggtgacaggcgcaacaattcacacgaagagcgggttatggtgcagagtgaggagaaggacctgatcatccaccagttggcaccaaaaggtatcgcttgacttctcatagcatatgccttaatcaagtacttaaagcagttctatgaacagaaacaatactatgttcgtgacaacatctcccgtagcagtagggacagcatttcatgcatcagtgctatctctgttcgacacatgggctcaaattctgcacctaaaacaatagtacacacacttaatgccaaactgactagatgatgatgatgttggtagatctaatctaagccgatcattgcacccagcaactcatgcttcatgtctcacctgaggtgtccggtttcttctaaactcagataacctgatctaggctgtggcagcatgccattcggtagtagtaagttcagagaatggaagcaagttaggtttcagtctcgtgctttcttgtcaggtagccacagcattatgacgtggatcaaattaatgttaggctgtgcaaaacatggacctctggtttatcatattgaggtgttcgttttgtgcagctgtgcttgtgccgtgccgcagcgggatgcatgcagtgcaggaaacaagaagcacacaggaataaatgcatcgatgcagacaacaaccaatacaagggtaagtaaagccagctactcctactccttagttcttttttcgctcatgatgtgatggtgtatagaagtatatactattcgattatttgtacgatgcatacgcatctgtgcgtgcctctttgacggcgaaaaatcgttggggttgaactggaaattgtgctgagttgttacttcatctcaggctgaaacagcacgtttttgcgacctttttgtggtcagcaaattcgctgtcggccaagctgtatgaatagtatggatgatccagtccattttaatcaaatctgcacagacaatgaaagctagttacttttacatgttttaagcaaaaaacactgcttatatttagtgtggtgactattttatctgccttcagatacataatagttttactgttacttcatactgtgtccgagtcacagcatggaaagtagcaactagtagtatactggtttgacatcatttaccgtgttaatcatacatcatacatcagtgggatgcttggagcctaagcaccctcgatagtaacccgaagtggaccgtagttaagcaaagcaactttcttttttgttcctttgaccacgtctaatgactccccatgcaacaagttgacacctaattaagggtccttgtaccttagagaacgaaggttctagaaggtgcatagaccgatctcaacactatatgtatgatggtattgtggaaaatacttgtgccggacaactatgacttgaatattcaacggcacactttggacttgtagtagggtatatatgtgaatatatttcgggaggagcatgcacgttttttgtcacttgtcagtaagagagcttttaggcttgtttggagcgaagagaatttatatattcttgtttgaattgcagtctaacgggattttaagatttgtttggataacccagattagaccatctaggcttttttggaatacgggaaaaatccccgttcctacatggattgaattatttccagtgaaatttgtaggttccatttaggcctaaacctctacggataaatatttaggacccttttgatttgtatgaaaaactgaggaaatttgtaggatttgattcacaggaaaaaattttatttggtcatttggaacaaaatattaagaatacaacaatcacgtaattcctacagaatggctcaagataaagagattttattgggaaagttaacttaaggttcaaccttagagagactttcattcgagtctcatctctcctctagtgtttttttatggtctatccaggtcgtctctgtatatatatgtattttgtaatcatttgttttatatttgcatccctatatctaggtcctatgatttttttttcttattctagcattttctcaatcctgtatttcaaaggtgcacttagttttgttccatagaccaaaaagaaattaggacaaaaagagttctcatctctttttttctaacaaaaaacaagcggatggactgatatagcaaggcatataaggcctgtttagttcgcgaaaaaaaaattttgggtgtcacattagatatttgaccggatgtcggaatggtttttcggacacgaatgaaaaaaataattttataactcgcttggaaaccgcgagacgaatcttttgagcctaattagcccgtcattagcacatgtgggttactatagcacttatggctaatcatggactaattagactcaaaaaattcgtgtcgcgatttcctccctaactgtgcaattagttttttcatttatctatatttaatgcttcatgcatgtgtccaaagattcgatgtgatgtttttgggaaaaaaatttgggaaactaaactgggcctaagtggtttcaattgatgaagtgactaggagctttcaaagaaagaattgacgtccaaggacaaagggtgcaacctaacaaaggcgaaagcaccgggaaaattcctagcaaacctttgacttggaggcgagatgtatggacttcataaaagtaaaaccatactccatttagcaaagctaatatatgtggtgcttataaattagcggtcaattatcgggttccagacaaggcatttagtgctatgtgaaatctatagaggatagttctcatgatcattagagacatgaaacttttacctcgtagatctcgtttggaacacatgaattacgttaattcggaagaaacaatctaatttccacaagaatttggaaatttttccgaagctccaaacatggccttattagaaccctgtactggtgtatcctctagtaacaacactaggactaagcgaaaagacatatttacaaacaaaaaataatttgtaaataaaacttctatatacgtgttcttagcgatctaaaaacaaaggctgaaaaaataaactacgatgaaaaaaaatcccaatatcaactccaaatttaaggttgaaaatttaaattttggcttataagcataaagcataaacaaaaaatgaggctgctattttcttgttccttggatactctttgaacatacgaattgggtagttactagtactagttaggcatcttagactaaaaatccctgcttccttcccaccaatccaatgttgaaaggtcaagattattgatggggcccagtactcaccaaatcccaaccaaaccctatcctctttccatccatttctattttgtattatcctatattcacatgtggtaaaatagtgacatgaaactgataggtaaatactctagtgccaagaccaataggtcattttcttaggctaacaaagctgttctcactacgtagagtttgcaaatacaatggccttgttcagctgcaagatgcagccgctgacacaaagtactatgcatgctggctgcgccacaaccgaacaagtgtagccgagcagggccaatatttttttcattatataataataatagagtaacgcattactatttgctgatgaaagaacatgccacatcaatattctattatagtattcttttgaaacatttttttgagtgtgtatgcttgtgcatcttctctgtaataaaaaagaaaaaagaaaatcgatatccatggaggtaaaaaaaaaaaaagtaaaccttccatgaattgcctttcatcaaattaaaattgtcccccaaagacatgtcgttgagcaagctaaactatgcaacacagtaaaattcttactgagttttgccaagctttgaagcaagttaaggttgatttcattgtaatctaaatactgtagatcacaaatgaaacagcaatcttaggcaagcaacaggtgttcaatcaaaacaagagcccctcccctctctctcactatctcataatgcttcattagaaaaaggaggtagcagagagtgtgtggtagatatgttaattatcagggagcatgtgggtatgtgacgacggagtggaagaagagaatatcaagtcaactctttgacccatgtcatcacgtaagctcacacgtcacccctcgtccgcatacgtcagctgggcccccactccagtgctcggctcagctgctcttgctggctcgagccgagccattcgcatgtagtacaaaatttatactcgaataaatttgtggatatattctaatttctcgcaaaaaaaataagaaattaaaaggtatcaacaataatttgtgatacgtatatactggagagaactgatgaaacaattcgtagccacacatcgttgtagtaagtacgtcgtacacaagatgctttatgttgtcaactcaataaaagtttgaatacaatttgtactacatgagttttaatcccaggtgcagtcacgatcatgttgaaaaccaccaaacagcacagtccagtcgcatttgaccttcaattagtcagagacgtgcaaactcaaacaaacaaattaatactaatatacatatctctcttggtgatcgggtagctaagacggaaggagacaagacaactggtaagtgctttgcttggctgccgttttgacacaccaaattaatcttcttttgaccaagacaaacaagcagcaacatttttagatcgaaatccacatgtatagtagagttcgtgcttatgtgtataaatattttcacaatcacttgtcattctcacttgcatatctttcagatggaatttttgtaagtcttttgaaaattgtgtgtgtatatcctcgcggtgtcaaggatggaggttatacttcctttgtaaaaaaaaagaaaaaaaacattaaatcttagatcaatccgcgtgtacgatatatatttgcgcatttgtatatctacacaatgagttgtcatttctcacatacgacggtatatatgttttgtaattcacacgtcttttcaatggaacttccataaatcttctgaaagtttcacaaacatatggctagtgtcaaattaggcttcaaaggggcacgtggtgaagagattcagctcacctagctcatccacgtccccatcttagctactctttcatctgggcgggaaagagggagaggacgacgctgatgacgaagacgaagaagaagaagaagagaatacggtaaaaaggaaaaaaaataaaaagggttaatataccgacgagaagacgtcgtttttggtctttttggcactgaagcttcgtggctatagcttgcaaaagttcctctgaatttgtgatcgatctcgtcgtcgagctcctttgtcgaattcacatgtaaaatgcttgctgtgtaaagggtagacagcgctctatttggtgaccgacgaccaaattaaagaaattattcgccggccgtctccgatcactggctgcttgcacatatgctgatatgcatttttcatgttcagctctctcaagatagcaagaatatacaccctccgtcccataatataagagattttagatggatgtgatacatctcagtacaatgaatctgtactataatatatcatatccatccaaaatcccttatattatgggacggagggatcggagtaatagctaacttgtgatgcggatcggggtccattcatacgcgtgtttttaacatgattgatctagctgctatttctgagttatcatcatcgttgccatcgcaagatctcgatctatcgtgcatctatcataacccacgcacaacagtgctgaacctaaaacaaaaattaccgaagatgttatacacacaatgatataattattgactaatatagcaattaacatggtataaattggatatagatgatcaatctagctgaagtcatgtgcaaggttcacaaaaccaatctttgcgcgaaaaccaaccggtttttgtgaaaccgttggtactcggtttgtggaagccgaacggtattagctgatttttgtacggtattgactaatatagcaattaacatgatataaattggatatggatgatcaatataactggaatcatgtgcacccgggaagatgcgcatttaggtattacgccactgcgcaccactagctacttccatttcttttgatttcttcagttaccaacaaattattatactgcattccgagtatatacgaaacaatagaatagagataaaaaaatccattttataaacttaaacttgaaccaaaggtccaaaaatcagccataattttattttatctttttaccaaaaccatttgtccttgaaggttgtgctagagaggtgtgaattttgtttcttatttcgaaagattagctaaaaaattgaaaaatcaaaatatggttttcagagtaaatttcttatttttttaaaaaaaaaacgtaccaatgtgctttcggaaaaagaggaaataggagggtagaaggcagcccaaatcgttcgacagtggtgtgagaatgagatccaagcaactctactcctgttcaagtgaagccaacgtacacatgtactgcatcctgcaccggtgtgcccgtacatggttatagtactactagtagttatcgcacgctggtcgccggcgccatcaacgggcgacatcacactatgcagccgagccgacagccgacgatgacgacaaccaaatcaaccaaaaccccacccaaaaaaatgttaaaaggattagcacaaatgtgaaccaaattaatctctttcggaaaagaaatgaaaaataaatactccctttattccaaaatatataaaattttgaatagatattattataaatcaaacctattcagatttatagtattataatattaatatgtctaatcaatctaaaatctcttatatcttaccatcttcatttcaaaatataacaatctctaactataaattttagacagacatttaatctagatttataattaaaaatatttatattttagaacaactagatttatagttataaatgattatgtagtaaaaagatgtgaaaagaggaaggagagaagctgcctcaagccaacggcgccatctcctctcctcagtgggtgggccccaccccctcgacctttcgaggaaaccccgcttcttcttctacttctctctcctcctttggtcagccaaccccccgcttccagaaggcgaccacgcgccaatcccgaccgtccgatctccacccccaatcccatccgacggctgagatgacccctcccccacccgtttgacccgtcgccgcccaccctataagtagccgccctcctccaccgcctcgagaactctccacactccagccatgggcgacgccggcggcggcatggcggcgcactgggcggcgctctacggcggcggagttaatggtggcgcggcggcgggggcggagggaacggtgtcgagcccgacctccgggggctcgccggtggcgggggggagcccgacgagggggggcgcggcggcgctgccggggatcgagggcgggcgcgtcgcgaagcccgcgcggcggcgctccagggcgtcgcggcgcgcgcccgtcacgctgctcaacaccgacacctccaacttccgcgccatggtgcagcagttcaccggcatccccaccccgccctacgccaccgccgccgccgccggcggcccggtcatcagcttcggcgccggcgagtacggcggcggcgccatgcccgtccgcccgtccccgacaccggcgtccgtcatgtcgttcgaccacctcggccaccaccaccgccaggcggcgtcgtcgctgcagagccagctgttccggccacagcaccagcaccaccaccagtacggcggcggcggcgacgtcgggtacggcggcggcggcggcgacatgtttctccacgggttcgagtcgtcgtcggcggaggagaggctgctgctgcagagcatccaggcggcgcagatgctgccggcggcgaggccgacgaccacctcggctaacaacgctaatggctacaacttcggatgattaattagccaacctcgcacttgattagtttgggtaattaaggtaagcatcaagtgctaattagagagagagaaattgaattaaagatgccattagttaaggctctttaattacatgatcaaccaagcatcatatggattgcttgattatttctcctcttttgtctgcaccatgatgttgttttaattttaatttttaaggttttatttttgttggcctttgctgtagagagatatacccagattagcaaggctgattaagttctttattaatacagtaattagtggtagcttagctagatgtgaaatggaatgaaaagcatgtaaatattttctcaacacagtactttggttaattttggtgtgtagcaagagcacttttggtgatcaccactagtgcaaaaacttgatatttagtgaggaatctttctccctttctagattgccttgctttggaagcaaagtttgaggatgctactatatcctctcctaatcaagtcgcgacgcgaattaatcacatgttgttttctcgaataaaaatgtgcttttctttctgcctaccaacccaacccattgggtttgatcgatattttgttctcttctatataaatatattcttttccgagttatatcttagtcgctgaatcatcacatatataacaatacattttttaagctatgtcttgatccatcatataaataagctacatcttaaccgctgagccatcatatatgtgtaatatacttcacccatcccaagatataagagattttggatggttgggatatttaatataaaactgaacttcctatctagattcgtagtattaattaggagaattcagttccgtaatactaaactgtccaatccgtctaaaatttcttatattataggacgacgaatggagtatatattttgcatatgtctcttggcagctgagcgactgggtgtgaatggttcatttctacctacacatgctctctttgttaggtggtcgatggattaatgggtctatgtgctagggaaattttaatgggtcccacaagaataatctgcaactcgattgatctcatgacgatctgatgatgatgatgccaagtcaaagtaataactgttgtgctgtgtccctctaaattaaggtttagaatagtctcacacaaccactaatagtagtttaattgagctgaacttgggttcagttaaccatatgcatggtgtgcaggatggaagttagctagcctccattttttgtttctttctacacatatatgtgtgcatgatgaatatgcctttgtgatttctttaatttcactttcagagatttggtttgttgtgcaactcatcaactttttttttatcaatccatgatgcttaaggtcaagcattcacacggggtattagattagcatattacgcatccttttgttataagagcaagtagatgcttatatatatcaaataattaattaataggcgtcgtcgtttagcaattgacatgtttgtgactgttggggtccgctgttagatattctccctctagtttcgaatacaagttcttgtagctaggtttgttcacacaaatctgcacataggtgtgtttaaaatgcaatggggattgtctgcagcccctgctactgcatcagcagtactgtagaggatatacatcctttaaaatgatggtgctattccacggttaattacaacgatttcattattttcagcttattcatcatattattgttgctgattatttacttcacgcttctaaaaaaataggattattcaaaaataaaaaaaattctaccgcattatttgaagttacatatgtaagtttatttattaaaatatttaatttacccctatactcaaagtagataattcgtggctaatcctatgaataatctatttcaaatatatactaccttaagattgtccgatttgaagatcataaaaggggaggaggggtgaacatcgccctcaagattatcaaagcctaatatttggagaagagttggaaattctaaaactgaatatactgacaagtgggccagtttgtaagcaaggtagcaaaatcatttatgtaaaattctctctcaaacttaattgaaaagtaatattttagtgattttagtgtccaccagtaaaatatcacaaaatttccatatcttttagcaaatccatatttttataatgtctaccagtaaacaccacgatttttaagtgttatatagcaaatttttaccaaatgagtaatacaaaatttgccaatatatcacagaggcatcgttcaaaaacaccatgttaatgctattttatgcccaatcgcccatacctataaattccaaagacatttcgctaaagtttttttaatcaaaactacatcaatttaatacattttagtcagatatttcagaaaactgcactgcaacaataattgattacttcatcataaaattgcaactttatacgcttgccgtgagtctaaacccaagcactagtcaggcacagatgcaaaactcacacggtcatcagaaccttatgttaaagttacagcttattgataatatcgtttgctaaagttctgtttttatggaatcccgatggttaaagttgtagtaaagcgattattttcgagtacaaattttgtgaaatttactcaagaaaaaagaaagactgaacatacgctcgttctagctagttgatgctccttaattgaaaacacacagttgcattgcatggttgtaaatgcagggagaagtagtcaatataaaataaaaccttgcatgcctaatcagctaaggttaaggataacttgtggatggtggagatctgacgtgtcaaagctccagaaacacgtgtgcatgtttgaaagatcgtcgacggccgatgcagtaacttaattccaaacattcaatattatttgtcttgtctttgcactgatcatcgactagctaggctagctgcttgcttaattcgcttgcttcgcgcctaattagcctctgccctttttacactcggacagtgacatgtatttttcagatgaagacgtgtatttctaaccgtatttgtacatgtatatgtgtatgcttatttgtacaacagtacaagactgtcaagctatctctagctggctggctggctggcttgtttgatgaccaatttgagaaatcaaagcgctgtgaaaatggttgagtggtctattgtatatcgtggaattatgttataaaatttgatggaaatattcagtttctcattttatttaggtcctatttcgcacaaggtttcagaactcaagatctggaatttttaagagcttaggcattactagctctagaaatctataaaaatctggaatcataattactagaaggaatcatttaattcctattttagaggaaatacaaaattttaaattgatttactccctcaggtttcataacttttaactttggacaagattgttggccaaagttaaagtcaaactattagagctttaaccattaatgatattcaaaatatttagtttgaaaacactggaacaagatgtatagaaaatcattaaaaagtattttattaaaattaaatatctacttatatatatatatattgtaatgaaaaattataatcaaaggtaggttggtatgttttgaaggacatgtgtcgttgttcaagacatcaagagttataaaaccgaagccgaagggaataactctataaattgtagaatgtggatctgggattttgatttgtgccaaacagggccttaattacttagcgtgcgctcttgagggatacgatggtaaattggtaatgaatcaaactatatcatttttaattaaataagttaaaccgatgattaactccaaacagtttgtactttgtttgcttcctgcaagttagtagagttatgcccggtcaaacacaggcagctttaagttgagccattgaagataaaaccaagctcccaaaatcgatcatagcaaacattcgattggttgagtcaatgaaaaagagggtcaattttgagacgatggcaatgatcaaatcagtgaaatcgccatggatagctgctgagttctgacttgtagatcaacactgaagtccgggtcactccatttgacagtctttttcattttcagtctaagaaggcaataatccatcttgatgatgaaaagaagaaacccccatttggccatttgcattgttctttatgacttaattagtataatcaaagatgtaaatggagattaaagctcttgctccctgaatctgataaaccatgcatggatttttttaattaactgaacataattatgcatgtcagagtgttagttcagaaacctagaatcacacatcgaacaggactcagtttctagctgattatcaacagttcaaaaccatatagtacccaagttgatgttatattgattcttgatatgcaaatttttgattaggggacatgcacataatgcacatcgctctgaccactgagaggctgaaaagggcttatatatcatcaggccatcagcccatcacacagattaatttgcttccatgctaggaataagtccactttgactcctttaaaagtgacccgaatctaatccttgaccctcaaccgtaaaactggatagaacgactcctcaaactattgaaaccggtgcaatttgactcccttagtggttttggatggcggtttcgctgacatggcgcttacatggcggtgttgatctagtctgtggtgttgacgtggcgcttaggtggcatttcaattagaaacatatatgtgggacccgtttgtcatacacaaaaaaaaattgtcatcctctctctttcttctcatccccctctttctcccttctctctttatttctctttctctccccttccaccgtccgcggggagcacgggttgaagcggcgacggggcgggggctggagtggtggtgaccggtgggagctgaagcggcggtggcggtagcgggctagagctaacgcgggtggaggcggtaggagaaggaggcggcggcgatggaaaccgccccacgccacagacctccaacgaggcggctgcggctgcctccgacaagcgcgttggattatccccagcctccgtaagctccagcccactgccaccgctgctccagctagctccggctcccgacgacgccgaaccaggtcaccttcttctgcgcctcgcccaacgtcttcaggaactcctcacgccaccggaagccgcactcccccatgatggcgcgcaacgtcaggttggttagcgtcccggtgatctgcctgctcacgttcagtgccggcggtggcggcgatggcgctgacgaggcgggcgacctgctcctccctagcggaacgagcgcaccttgccgaagagtaccccccccccccccggtggcgtcgatggagttcctcactgtacgcccagccatggaggtgggagcccccgggctaggcgccaggaggaggccgagctccatcctcgactttggccatgatggtatgcatgtagcaactcctgccttgggacgaaggcaaggcatatcatcaccttctcggcatgatttgtgatgagcaggaattagtaatcgagctacattggtgtacacatcttcttgcttgcttgtcttctcctgtgatgctacattggtgtgtttgttgtgctgctgctcgactctgccggctccgctccatacacctttgccggagcattgtgtgggttggtcgggctgggttcatggactgcatcctcggggaccgccaccatcaggcatgcggatacggtgaggttgaggtctatcacgatggggaagctggctcccgcccgctgctgccacgtcggccatcgcccgccgccgctctgactcccgcttgccgtcaccgcccctgcccgcagattgcgctatgagagacaaggtgaagagaaacggggagataaagagagagaagggagagagagagagagggagggggaagaagagagagtgtgaatgacgtgtggtccacaatattttgctagatatctgtcatcaaatttctccccctgatatttgtcgtttttctgaccgttggatttgcgctacgatgcgtgcaaggattggtttggatcaggtcgcgtgagagtcaaagcctggtctcgcggagttgtcaaatttcgatttccgcgccgtgttcatagacgttttcattttcttctcgctacttatctctttctcctcgttgtctccacgctctcgctctctctctctctcgttctctctttttttttctctttcattgttttctccgtcgatagagaagagagagagagccatctcgccgcggcgagagagagggggctcgccggcgggagagagggggctcgccgacgggagagatctggcttgccggcgagcacgagagagaggtagttctctcgctccttttcctttctctttttttttctctctcttcattgttttctccggagagagagagagccatctcgccggcgagagagagcgggctcgtcgacgagagagagctggcttgctgatgtgcgcacgagagaggtgggtcgctgtggagattcaactcaccagagagttttttttctgatttctctccttctctcctattcgatttcgttttgttccataagttttaggcaaatatcttcggtgatgtatactttcgtagatccgtgatttctatgtattattgatgagatttataagttctaggtgtttagtcccctgatcttttgatttataggcttagctacacattattaaaaatttctagtgtagtttttatttggttattttgtaagccaacgatatgatattttttgagatgtgcttcagtgctcagggatgttttcctgctcacaaatttttatcaggtgcaagtgtgtgtagcattttgcttggattcaggtgcgaattgagttcaggagggagaaacacattgttgcattttttatctgaatgctgcatttcgtttcagagatgcatgtactggtctgttcgaattgtaaatttttgccccaaattgtttgctgtctctgctcggttttcatgcagttagactactcggtctacttgttggcatgtggctcaattcgtttgtgggattccagtccaagagtttggttgcagattggcaaacatttctcagtgctcaaactgaccggggatgttttcctgttgaatttgtatgggttacgttttgccttaattctggtgtgaactgaacagagaagggaaagcatctgttgcaaatttatctgaattctgcattgcgtttcatagatgtatggactgattagtaccgatgaccaactgatcatcaattgtttggttcagttctcaacaataactgatccttctctgttgcaaactgatccaactacctccatgtttcatattttgcaaactgatccaacttgttacagaaaaataatcagttaattacattactgattaaatttttaattattattttcagtaatttgtttagatggctcgtattcacaattcaactcttggcaaggatccgattgatattagttgcatttcattctcatatattagttgactaatctgtttggggatctatctctggtccccaagtatgtcttgtgttgccttcttcagcatattaatcatttcgtttcagagatgtacagcttgatttcctagtatgctgagttgtttggttaaattaaatccaatcccctgcatgcattttgccttggttcttgttttgttactctttctatgtatatgttgttctttggttcagaatttgttgtgcatgaacaaggaaagtagaactcgtatgaggctttcaggtatttaaggctggcgctttgatttttgtctctgggctagagtggggagtcttggcttcaactttttttcttttgctgaatttggtgttctttcaagttaaaaatctggatggtttttcagtgcttaccccctttccagtagcctagatttgtgactgtactttgctcttggtcagctttagggtgatttttttttgtgttctacattggtaattaccggtgtgcgacgtggacactgttttttcttatttattttggatttagccctgtaggtgctgctgcttaggagttctacttcttatcctggagatgtactgtctagttagattaatccatcataaagttgacatagtattgtttgttaatgacattatagaggccatacaatagttctttgatttattttgtcctccctgaacatgttttatttaattacatttattcgtcaaagaaataaatgtattcttcatttttgtaaagcatgattgtacttactagtctttcattttcattaagaaatatgtattgatcataaagtaattgtgctttattttcgccaatctctgattcaattgtctctgactttttgcctttttcaaaatcctgcaggtaacgagatcctggaactgaaaaagaaagcataattaattagtcaaaatcagtgtaagtattgcaaaattttccattatgactgatttatttctatcatgcttgctataatcaaaattttgtgtttgccatatgatgattaataacatttgaattaagcaaatctaagttctgcacgtcatcaagcgagaaaattaattatcctaagtaaaaagaataattaaatttcttatctgatgattgtacagagctttgaggtgttttttttgtttaaatctgatggcatatttttttttatgttttgacaccatttttgaggcatactaatgcattatccatagcctctaattcttcatatgatgttttttgcttaatgtattcgacttatagtccaattacagtccatatgcactgtaattacagttgtaacttctattatttctcactgtaactgaatgcaggtagttagattatttttatttatcatgctttgcatctaaattttgccatatataaatttgtgctagatgtaatttttgacaaatatcagagatggtgcataataataggtaagcatgatttttctaaccttcaactgtcttcttgatttttaattcttcagactcgattatgtctcttatacatgtctttgattgtgtattccctgtaacttaagcatgtaatctatgacatcctgcatgtttgggtcattttatactatgttacaatctggaataatgttgattctatcgaaagagtactgaatttctatgagaaagttaagcatgattccagttacagtccatatgcactgtagttacagttgtagtttttgttatttttccctgtaacagaaatgcatgtataggttatatgtaatatatttttagaacatgttagaataggaagtaatgcatgagtactgaaatttctgagagaagctacagtaggaattaatgctgatgttattgcgttagtactgaaatgaaaattcaacacaagtatgttcggtgcatgttttgtgtttatataagtacttaattttttatttcatttgaataggaaaatctgcatatagtttagtgacataattttgtaattatgtcattagattctttgcagattttgttgctcaaatgtagtcaaaaattagatctgttatagttcaactttagttgcatagaaagtttagaatgctagcccactataattacaatgtttcaatagtatcttgaaagattttgcatgaatactgtaataacaatgccattctaatctggaacaactttggtgttctgaattttggtttcttcagtatgttttgccataatattgctcttatctgattcttggctttttttttttgcacatcttgtactgcttcatgaccagcaactggagaaaattgaagttttcatgagaaactacagtgttatgtttggtaagttatgaaagaaacatttatacttgtttttttgtaccttttatctgtattggttcttttttcttggtctgcaacttgatgtccttggttgtttctgcagctgaaattgttcctgcaaaatgttattgaaagcattacaaagcatgttagttttgtatgttctaggaaatctaactaattaacctaaatattttggttttcatatgctctaggtaatctgactatcaaacttaaatatttttgggtttcatgcagtctaaaattatagtaattataacttaaaacatacttacagttcaactcatcaccacttacagtgcagttacagtcaaaatatacctcacttacagttgtaatttctgttatttctcactgtaactagctgttggtagttagagcttgtaattgattgacattggtttattactgatttgtgtgaaaactaggacacttgtagtttgggaacccttgggactcttttttttttggttagttgtgcatgcaaaagttagaatatgtgtgcttttagtttcataaaaacatagtgagcttgtaatgcttccccttgtgttctaggttttttttccaatcaatgcagtgtatggtaatcatccatttttgaattagttatatgttttactgaaatttagctagccttcttgcatcattgcaagtgtgaggccatttcatttatgttgtctgttagtgtatgcaaccaacattaattttttttctttgtctttgcatagattctgattgagtgcttcctggacataactcttatttgtgtactaattcttttcattcaaatagaaaaggagaacttgtgcctttatggtttattagtgctttttatttctgttgcagcgtttagatgttttctcttaggaaaataccctagaaaaatatatctcttgaggcatttgaattgctgatctaaatctgtatatgatgcccacttcttacatctagtgatttagttaagttgttttcaaatggtattttgagttatgaattttgtttatcagatgaagtcaatattttaggtttcatgtagtcttaaaacacacttacagggcaactcatctccacttatagtgtagttacagtggaaatgtacctcacttgcagttgtaatttctgttctctctcactgtaactgactgttggtagttagattcctcctattttagctccaaagttgtatccattcaataactaccagttactttatgctcactatttatagtctttccctgttgatttgaccaatttagtggtggaagcttcgcattcttctcgtcaggctagcacatggctcatttgtgtgctaacttaggctaaatcactagagagcgaaactttcactttgtgcaaatatatccagttggttgctaagagcaatcccaaatttgatggttctgtatactcaaattggctgcttaaactaaaaatataaatatctcaaaacactggtaaaccaaagaccatattgatactctactttttggatagattataactctatccctgcagaagtgagattcaagtctgtttgttgttaccttaaaacacacttacagtgcaactcatcactacttatagtgcagttacagtagaaatatacctcacttacagttgtaatttctgttatttctcactgtaactggctgttggtagtttttgatattggttttatcagtgaattgtgcaaaaactgagggacttgtagtttagggaaccctaggcatcttcatttttttttatctgtgcctgatatatttgtttttgctagttattaatgtaggcctagttttgtactgttattttctattatctgtgttgctttgtgtttcatgcagcaccatccatcactagtataacttaaatatacttacacttcaactcatcaccacttacggttcagttacagtggaaatataccttagttacaaatgtaatttttattatttatttttgtaactaactgttggtagtttgatcttcattttactttctgaacttgtcacggtgtccctgtcaaggtaccatgtatatgtcgaatctagggaggctgatgccctgctagatgggcatttttatagttattatgaatttttagttcagagttaattttggcatataggactatatgatttcagttctttggttcataaagaaaatttttcgtgcacaaagaaaatccccatttttgcagatttctcgttgcatatgctagcagtttactgatgcactgttttctgcaatcctgacaggtgctgttcaggaagaagctgagtttcatggtgtcatttcaagctcaacatatgagatgtgctcctcatttgatcaaattggttgttaaaggttttatagcaaatatcactgattgaatgagcttgtaaacttgttttttttgccaatttttgtgagattccattttgttctctctgtgcacacatggcttccctctgcacacatggcacaatacaaaatttttaatgaagttctgagttagtaatggcctagttttgtactgtgcatatgcactgaagaaatagtgctgagttagtgacttgagactgaagtgtgcagtctgtgttcttcagatatgatgcggtttttctgaagaatgtaattcttttacttctgggtttactgctcgaatgtgaacttatgattcatcttgctttcgaaatttgaagctgtaatttttgcattttatgttcttggtaggaggtaattggattgggcgtgggattcactgaagatttcattattttgactttgatttatctgaagaaatatattgttgcttcggtgatttgagactgtaaatctgtaatatgcattttgttttcttgtttggaagatgtaaccggattgggtttggaattcactgaagatttcacatattctctatcacttatggtgtacagtgtgctatctaaaagttgtgtatcatttcctagctaattgtaaccatgaagttgtctatttaaataatgtagggtgcaagcttgttgtatttttactcagaagaatttttgagttctcaataatttgagcagatctggactttgttcttatctagaaactgaagaacatgttgactacttttgttctcgttgaaataataaacagtgaggtgtgtgaggtaccaaaatgatagccctagtttataatctaaataaatccccaatttcatccatttctgacaaagattagaaatctgacttctgtttctttgttttttttcaagatttaggatgaaggcaaacagtgaatgatttgtgttgaaatttccagcaaaaaggcaaggatggatgagtggtaggttcatatttacctgggagtttggtttcttttgttagtttcatcttcttggttccatcttcttgatccatctgcttgttcttctttttcttttcctcctcttcgtccatggcttggtcgcctttctgttcaatctggtctttctcttgcgtgttctttttttctcttatgccgtctccgatcgatctactagctaagctgttgcgcgtgatctgtttttttctttttttaatagttttcttggattccaagctgatatggctgtgtttgtattgggctacgatgtgatattgggctggcataatcttatcttccttttttggccttttttttatgctatctcattctgggctgagttttaatttttatgtttgatctactcgtttgggctagttttgaagcccaatatgtttttttctttatttattttgatccaatacgagaaaatttggttttattatttttttccttgtccattggatgcgtatccgagggcttgaaaaaagtgggtgattttgccccaaaaatctgtcgacaaacagatagctagttcccaacgtatttttatgtgtgaatcacaagtgggtcccacagattttttttaattctaatgccacgtaagcgttacgtgggacaaatactaggtcaacatcgccacgtcaacgccacatcagcaaaaccgccctccaaaaccactaggggagtcaaattgcaccggtttcattagtttggggagtcgttctatccggttttgcggttgagggtcatggattagattcggatctcttttaagggactcaaagtggacttattcctccatgctaagcctgcattaatgatgggcccggatagtagctttcctggcccggcccatttcggcctcacagatggatgatgacgcgtgcaaactgcccagtctctgaatttttcaaaactaattttcaggaagaaaaccaatctagaattccggaattgtcattcaactaattattagctccaacgagaatttcgcacgaaacaattcaattagtattcaaatcatttttctattctaaaagaacacgcaaaaaaaaaagaaggggagttaagtcgttatacttccctttatttctcatcttttctaatccaaccgtttcatatttaaattgttttgacttttttatagttaaactttttcaaatttgatcacatttatagtaaaactagcaatatatacaacaagaagttagttttaacattgaatatattttgataatacgtttattttgtgttggaaatattgctatatttttctataatcttggttaaacttaaaaatatgacacagtatgaaacagagggagtacttttgactacggatgcaagcgggccaacccgcgggtctgtttatagacaaaatttagcaggtaactcgcgggttacctactaatttaacctataaacgggtttatggattgacccacccgcatctttagatgcagcaaacaaggccacgacacgaaaacccacggattatcacaaatttgacctataagtgagctcgcggatcagcctgcttacatccctactttttgcaccatctttcacctttttcataagcaaagcaaaacacttgtgaattcggttatattagccaaaaaacaagaaaacaaaacctggccccaccagtcatagcatctccaatccgggcccacccgacagtgacactccatcatcatgacatcacgagacgtagcctctcctcttctcccttcccttcccatgtgaaatctcgccgtctcctctcggagcctttcctcctcgccttctcccttctctctctctctctctctctctctctctctctctctcccgaaccttctcgccatggccgaccacgctgcggcggaggcggcgccgcagtcgtcgcaggaggaggaggaggactggaaggaggccgaggggggagacggggacgtcgaggtggcggacaggggcggcggaggcggcgccgccaatgggggaatcccggaggggaggccgatccgggtctacgcggacggaatctacgatctcttccacttcggccacgccaagtcgctcgagcaggccaagaggctgtgagaaaccccctccccctccccttctctctcgtcgtagtctcgctcactcgattcgatctgcttctcgccgtcatgatgatgtcatcatgatttgaagtattttgtatggagtaatcagaggcagtttttgtttttggtctggttcggcgtgagatttgagcgagaaatgttagcttttttagttagggtggggaatctgacgccattattagcagttcaaccacgtcctgcagcgatttgctatcgtttgttgcgatacttcatcttaatagatcgtttcgttgattcttagtagatcgtttcgttgattttggtgtaaaaagtgtttttactgtcgcgctgccgattaggaagtagtctgatgatgaatcttgctgtagataatcctttctgagaaaaatggatggatgttaattgctggtgttttcgtgcttttgtcatgtgagggacatgcttgagcaatctcggtatgttttacctaacgtgatatcactctcggatgtcctttcttgtttgccctatgttggatcattcagagggaaagataaactgttcacagattccttttcaaataatgcggtttggtttggcattatttgccactctctgtttaatctgtacggtaatcttgccttgtttccttttatttgtggactaaccgggtttattggttggatgcggtcaaatcagtctgctctaaggaaatgtgcttatctgttccaaactagtctgtgattttttgcccattacgaagttcctcacacatatatcattcacagaagaccttttgtgttgtgggatagttacttgtttacacgaaaatgcttttgggtactaatggggaaagtgcagtgcatgacttttctgtggcatcttttaacttttacaaggaaccttgcatttgcagtcatgctctgtttcttaagaatgaagccgtgtttctatctttaaaggctatcctgcatgatcttgtgaaagattattttttttatccaattgtacacctcataaaaaaaactccaattgtatactctcctacttggagacacgtctttttccctatatgttccatagattttgtgcatacttagagccacctttttcatgtatgttctgaatagttgcagccttgttaaaatttgtattcaactactatatagaaatttatttactggatctattgcaatacaacaaagatgttgtttaaccgaactgccttcaataatttaggtttcctaacacatatctccttgtcggatgctgcaatgatgagttgacacataagtacaaagggagaactgttatgacagaggatgagcgatatgaatcacttcgtcactgcaagtaatcttgtcttatgctttgttctagtcaataagccaccaatattatatctttctttagttcttttagttactatactatgataatacatatgctcttcttttcctaggtgggtggatgaagtcattcctgatgctccatgggtggtaacggaagaattcttgaataaacataacattgattttgttgcacatgattctctgccgtaagtgttcttaacagatctcgatgtttataacatagtaatcatttctgatgtacttgttgtgataatacatatgctggtcttttctttctttacataatatatacagagcctttgggccttcacagtgatggatctgaaattcaaatatcattatctttaattaatatattcaccttatttttcctatttgaatatacaggtatgctgatgctagtggagctggtaacgatgtctatgaatttgtgagccctaatttcacgactgttttcttcaattacaattattgattaaaattttgtttgtcgtatctagtaacagttattatttgtgtagactggcatatttctgacagagactaatctcgttgtgtctatcaggtcaaaaaacttggtaaatttaaggaaacccagcgcacagatgggatatcgacgtcagatattataatgcggattgttaaggattataatgagtatgttatgcggaacctggccagggggtacaccagaaaggatcttggtgtcagttacgttaaggcatgtgatattaacctgacactttcacctcaattccagcttgaataggttgtctttatattttaacagtgctgcggtaatgttttgaactggccacctgatctttgatacatcttatcaggaaaaaagactgagagttaacatgggattaaaaaacctgcgtgacaaagtgaagcagcaccaagaaaaagtaggggagaaggtattattcactatcttcctaatttatgtcaaagtagggtttaacaattgattaactgacagttttgccatcttcgtatctctctgtgttgatcactggttggttaatgcagggatactttccttgtgtcattttactttgataaacataattctgaatgtgacatgtatggcatgtaaagtataatcttttctggatagtgttttgttggttcaattggtagacttttattggaagctaaaaatacgttctcaagcttaccatgatgatgatgctacatgtccatatcttcagtttgatgtactttctcttttctagttcaaaattaatcttttggtggtcaagacttttctcttttctagttcaactaatcttttggtagtcaagacctagagtccaaatctgatatctgtatcttgtacactctcctacttcaaacaaagatactaatttctcctactaaagttgctaattaatatttgggtcccccctaatcttttctagttcaactagtgttttgttggtcaagacctagagtccaaatctgatatctgtatctagtacactctcgtacttcaaacaaagattctaatttctcctactaaagttgctaattaatatttgggcccccctaataatattttggtcctacaaacctagcattccctctgaaattaacctgtccaaatgttttgaaataaattggttattcgcagtggaatacaatggcgaaactccaggaagagtgggtggaaaatgcagatcgatgggttgctggttttctggagaagtttgaagaaggctgccactcaatggttaatcactccctgccacttagtagactagaacttagcatatgattcaaggaattcattgctcacttcaacttgctttaaaaaaattcctcagggaactgccatcaaagagcggatccaagagaggctcaaggcgcaatccagggatttcagccttctacagtatgatggcgaggatgttgacgaggatgaggacgacgacgaatatgtcagagaataatgccaccactgtgaatatacgtcaagtataatatatgtacatgcgctgcatgtagcagatcttcaatccttgggcatgtcatgcacccctctctcttcaggaatggtgaacttgtgccccccaggttagattttggtgctgtgttgtagcaatagcaggtgttttgtttaggctaagacgcaaagtaagcctgtaaaatcccctagtcgatggcctgaatggttatctggaagatacagatatgttcaattatatttttgtttagcacacaagaacactatatttcaattgactatctactatatttcaattgactatctactatatttcaatcgactatctttcatactttttgaacataattaagtttcctaggtccctacatggtggtttttccccatagttcttccagggaaaaaaaagaaagaacaatcttcatacatataagttttaagttttggttgattacctttgccttcgctttttgtacgtgtaatacttgtatatattcttaactgcatttgttattattttcattatatttttgtctgctggactatttaacattgatgtgaaaaaacacgattgtgatttgcaattaatgcagggaccaatttgcaaaatccagggtcgctaccgatagtggcgatcatacgtgaatagggatgaaaacggtcggaaacgatcggaaaacagcctcaaccatttccgtaaccatatttttctcggaaacgaaatcggaaacggtaaagtcggaaacgaaaaagatatcagaaatattggaaaaccggaaacggaacaatacggacgaaaacatgtcggtacagatcggaaactggtaacaaatacggaaacattaaactataaaaacatatatttaactttacataagtatgttatatatatacataaattcaagcttatactatataaattataaattaacttcattttagccatgtacaaaagttagagattttattgaagagtcattcaatctataagctgtgggtcaagtatagacatgtcctataatatcgacatatttagaatacggtaattaccatgttataagaaacggtaatttccgcaagaatacggtaaatacggaaacgatcggtataacagcaaaaccatttccgttttcatttccatattttttaccatttccatttttgtttcggtcgattaccatttccatatggctcggccggtagaaagtcgaaaacgaacgccggtcggccggtaattaccgttaccgttttcacccctatacgtgaaggcccattcgtcgttcatcaatattcaatgcagaaaaggtgtgtcgctatcaacgatgctgatcctacatagagttcattttaaaaacaaataagatccagaaattctcgttagcttagacaaggctaacgacagataccagtatacaagtccatagacgcaagcaaaattgacaattttcgattcgagactatttagagggtaaaatcaggccaaggtcatcgggccatagaccatttattataaacataagctaaattgacaatcgtcgagactatttcggcactctttcctacccatctctatcgttttctgcgcgcacgctttttaaactactaaatgtaacttttttaaaaaaaaattatatacgaaagttactttaaaaattgtactgatctatttttttaaaaaaagctaatacttaattaatcaagtgttaaaagatggttccgttttatgtgtaggagggatgggttcccatgcactgccgaacgcagctgcaaattaaacggtcactgcaaattctctgccttcatctcgcatgcgagatgccacattgatatcgtccctatacaagggccattttgcaaaattttggatggtaccaaccggggcctttatacaaaaataccatctcgcgggccgcacgtgacagtcgggccttagtgggcttgggcctaaaatgctgcacgggccacaaaaccgcaggcccactcgggcctgcttctcccccatgtccggcggccggagccggcccgacgagcccgacgccgacgccgcctgcgctggccgccgtcggcgacggagcggcatctctgcatctcgcgagtccgtgacttatcgatgattgattccacttcaggatacctcgaccttccaactcgccgtcggccatctccggcgactgacggcggcggccgcgcacgcatgcggaccatcgatcaagtggtaatcacgtctcaaatttatcccttttcttttttttttctgattattatgagattattatgaaaccgaaaaccatggactaaaaccaccggtatcgaattccactgttccccaccaccaaccccacccccagtttggccaaattcccaagatttatttggccaagcagtcccaaactccaagatgaaatcttggagcttccaagggttaaaaaaaccaaagccttcttcttgggttcctttcctattggctgcaaattcatcgacaccacattgccattggagcagcttgttgccttcttcagactcttttcttgaagtttcagccaagaaagtgagcgaggccacacaagttcaggtgtgtgctggggccatctggaattgaggtaaattgatttgtttcttgccatttccttgtgccaggaattttggtatctctttctggtgccttattctgattctttcatggctcctacgtttgtttttgtgttcttgctgacgcaggcggccattatttagaggcgaaaggaaatgtctgtctctttcttgtctgaggacttgaggaggttctgatacatgcttagtttcatcgatttgtttggcgctttctttgtgatctttttctcggactttacatttgtttctgttcttgcaggcatccttaggagcaaacagaaatatctggtaccattctgatggatatttccaatccttgtgttttaatactttgaggtaatgagacgtgatttacgctttgtgctctttaatgctggtcttaaatagtggatgttgtccaatagttcaacacacccctcatttttcttgtgaagcaagtagacagatacattagatttgacttactcctattttcttgagaaaaaattggggtctttaaatattcttgcttggattgcttgaaagagtttgctcttcctttctgggaatggttgcctcaattcggagatttacagatttatgggttgctttcatagtggtggtaacttctttcttgcttttgttttgccctgtagttcaagtcactgatgttataagttagccatgaattattatatggtcttgatcttctctcattactatatgctgctcttattatttcatttgcaatgagatttggttgtcagaggtatggtatgattgaactcctagttctaggtcgcggagccgatctttgattttctttttttttagttattcagttctgaaaatagttggtcaggtcccattcttcattattcccccctgtcaaagtaattctcaatctgtgcagatcctcgattatgtcagctattttcagtttacagtggatatgcaaatagccaattgcaggttgctcctatatattaatttagttctgcattctgcagttctttatgcttgatatttgcaatctgatttcccatacctacaaaatctttgtggcttatactggtgaatacattgacagtatgtaatccattttctgcagtgcagaagacaattaatcctttgtgacaattctggatgaacaagcagatacaatttgtcataagcagcagtctgaattcttgatcatcaccaaaaaatgtcgctgctatcgaagctgagattggtcacggtggatgtgacaggaaccctgatagcatacaaggggcagcttggtgattactactgcatggcagccaaatctgcagggatgccatgccctgattacaagcggatgcatgaaggcttcaaggctgcatacaccgagatgactgtcagacacccttgctttggccatgcttccaacatgcccaacatcgattggtggaagatgtgtgtcaaggactctttcatcagggtaaacacttcttgtaatcttccaaagaaatgacttttttcagggggaaaaaaagaactttcttttagatgcattgctgcaattctctcatcttctgcctgttggcttatcagccacagccaaattgaattttggagctcaatttcaaagttgattcgtggtttattctctagcattgtttttctttactctgcgaataatacagatataagagttttactcgcaaattaatttttgttgcttcaagagcagccaagggtagtatacttttctagcttaagaactgatgaaaatgttgtaatcttgtctattgtttgacatggtgcaggctgggtatgagtatgatgatgccacatttgagaaaatattcagacggatttactccactttcggttcctctgcaccctactcggtgttccctgatgctcaacaattcctgagatggctgcgcaacaatggctgcaccgtcggtatcgtcagcaacgccgagtaccggtacaaggacgtcgtcctacctgcacttggtctcaatgaggtaaattctgcaaatttttctgcagatattatcagctgattaatcgaaccacaaaattcacaattactccgacagataggtggcatggcatttgccgttcttgttttcgtttttagctgtatgtgtgcactttcgtggtgtagaggtcgagagtatacttaaaattttctcaagttcaataaaacttccattatattaagaaaattcagtgaatttgaattgctcattctgatgctgatttgggtgtgtttgaactctgaaggggtcggagtgggatttcggggtgttctcggggatcgtgggcgtggagaagccggacaggaggatgtacgaggcggcgctggagatggccggcggcgtggcggcggcggaggctctgcacatcggcgacagcatgcgcaaggactacgcgccggcgcggcgggccgggatgcacgcgctgctgctggacaggttccgcacggccgaggcggagggctggcggcggtccggcgccgccgtgctccccgacctcgccgccgcccgggagtggctcaccgccgccgcggcgccgccggcgacggcggcgtggaggaggagcccgtcgtcgcagctgaccgctgagtcgtctgaataaattgtaacgcagcgaccaagaatgcggtggaaaaaaacatgtggaatttcacggcaagtttggatgcaaatcgagagaatttcacggcaaatcgaatttggtttgccaaaatctgtgtcgaagacttcaaattctctgttgtcacttttgtggtgttcggtttctactgaaaataaagattagttaggacacgaaaataaaaaaaatatattagtgtaggattaattgagtttaattattataaaattaaaaatttagatttttttaatattttaaaacagcttttataaaaagtttttatacggaatacaacatttagcagtttaaaaaacatcctaataaaatttaaaataaaattttttctcaatcagaaaaagaacatggcttttatcagcaaaaagttagggaaaactacaccaaagatggttatcttcctttttctttccaaattcgttgtcaaaatcacgagtagtaaatttcgaattcacgaaaatttctttcaaataaggctccgatactccgaatttcttaataaaaaaaagagtaaccattaggatgggcccacattacagtgacaccgcgatatgcaattgcaagtcgaaatatccatccacgagccttcgccgagccgagttggagaaggcgagcgatgctgcgcgcttgcggcggcgcgtcgccggcggcggcggcggcggcggtgcccgcgctcgtcagggcgcgcctcgcgaagcaggcctcctccgcagcccacgcggccgccaccgccaccgcctccgcttcctcctccctctccgcgctgggagaggtcgccgccgggcgcaaaggtctagtctagtctctgcggcattttgccgaacggctgtcggtcgcgccgcgaaagtgtcctctcccatcttgcttcttctgattacgcggcgaaaccgctcgcgccatggcggttgcttgcgcttgcggaaatgctcaagtggattgtggctgcatttacctgcgacgctgcagttcgttcttgttgagtggctgacattgatccactcatcgtttgattcacctgtaactgtaaccagtaatcattaatatctattgttaattgtagctgacttccagaagcatatttgctttgttgaaactaattgtatgagaagcgaggttttgtgtagagatgtgcctaatcattgctctatagaactaataggttggtcctcattaaccctctagagtcaggggttagcaattctctagagttttttttcctttcggcataatgcagagtactctggtgttgcattatccataattataccgttctgtacagtaagtattatgaagtggtgatagtcctcttatgtcaaaaatagttttatgtctcctagagatggctcataattagttttggaagttttaaatcattataatgcctaagcacaaagtggagttgaattttccaattggaatgcattgtctatttgttgtctagatctctcttgtattgtcaaactggaaataaagcatagctgattcttccttttttgggttaataataggctatggttaggagctactagacttggaggctggaatcttttttttttctttcacttgagttgacataaagactaacttcaaacattttttttaggtttggcaagagtagtattaaagaaaggaaagacccaaatatttcgagatgggagtccgatggtgtatagtggtgctgttgatagaataattggtcgacctcctccaaaaactggtgatgttgttcttgtagctgatggggcagagaaacctattggatggggtctctataactctgtgtccatgttttgtgttcggctgatgcaactagaagaagaggcaaaaaggtgacaaggtcacaagttgaagttctctgtttacagacaatttgagaacatggcctaatattttccctattttttttgtttacagggatccaacatgtgcactaaatatggaaagactgcttgaggcaaggattttatctgctgtggatttacggcgcagtttaggtctcccttcagttcacacaaatgcttatcgtctcatcaacagtgaaggggacaggtatatattattcttgagtctcgacttatgttatatggtcaaggtcaccaaaggtaccatgtcaagatcaatcatcacaagaagtgtaatcagtgcagaactatttggacttctagttctagagtatatttgacctccaaaatccaaattgcattgttccaatatattcgcacgaagaataatttttattattgttttgaaatgcagattgtctggtctaatagtggatatctttgctgatgttgctgtagttgcttcatctgctgcttgggttgagaaatataggcatgaaatccagttccttgttaacaaagtcagtgatgtgaaccatataaagtggagatcatcaacagatattctaaaagaagaaggattagatgtatcagaacaaaaggatcctgaatcgtcttcacactgtggaacagtggaggtgaaccaacttagtaattattgaaacaaagccattaaatttggtttacctttattactaatttcaagagagagatggcattcatgcactctattcagcacatcaatcagcttggtttttcagatttgacaatcttttcttcttcctatgttatgttgcctgttgttccaacacctctcaattgctgctcttactttcaggtcatggagaatgatgttctctatctagtctcattggaggggcagaaaacagggttttatgcagatcaacgtgagaaccgtcatttcatatcaacactctcaaaggaccaaagggttcttgatctgtgctgctatagtggtggttttgctctaaatgcagcaaagggtggtgctaataatgtcattggtataataccatatgctagcgaaccttttagtcctttgttgatcttttcatatgcgtcaattgttcaattgaatcattgatcatgaaacccacaaaagagtataacattatacatgtttggctgctaaggaaaatataattagtgtatcctttttcaggcattgattcatcagcatcagcactagaccttgccaataagaatattatcctgaataagcttgacacccaaaggatttcgtttgtaaaagaagatgcgactgcattcatgaaaggtgctatctcaagaaatgaggtctgggacttggtaatccttgatcctccaaagttggcacctcgaaaaaaggtaagcatacaatagagcatttaccattagtctctaatttgacttcaaatgagatatcttttcatccatggatctgaagtggcaaagaatgttacatatccagcagttcgcgaatcttcgatttcttatcagaagacacccaaagtaccctttagcatatgaacatcagttagcttctttggctggttgaccctagtttactgttagtacataatccatttggccctatataatcatgtctgttgaagcatctgtataagttcattgagggtttccaatcaataaaatggaaagtgtgcagcagaattttgaatcatagtattttgcttcaaaagaaataaagaaattaagtaaggagcatgtcttagatatacctattttagaggaagtcatgcgctttatgggtacttaaaactttagatgggtgaacaagtcaaatagaacctctttataagaccagacggaatcaaatagaacctctttataagaccagacggaggatctggttccagtttaccaggtgtttaccagaagcaaaaaaccattggttttctgaaacttgagcttgctagtgctctacttttagtaactgcttcgattattatctgtcctgttgtatttaggtgctacaaagtgcctcgggtatgtacagaagcttgaacgctcttgcgatgcaagtggtaaagccaggggggttactcatgacatgctcatgctctggagctatgacccaaagcggcctcttcctcagaaccattcaggtatgtcttttgatcatgttgcataaccaagtaatcagcatacaccttgtcacccatatgtatccaagcaactaacaccttatagtaacaataacatcaattgaaaggaacatccaataatggtccaatctaattatttccagcttgacaaactgtaaacattcaacagaaaaaaaattggacaaaacacaatgcccatatctagcttccaactcaagatttccctttttttgggtagaaggtttgcaatgtaaattcatgccccattccagccgtcatattggctataggtccaaggtggtaaaattgttttttttttgtaatgatacatattggattcaataatagtgttttacatcggaaattgccatcaagttatgcacatcgatgataacattatctcttttgtttttaatttcaagggtgctgcatcaatgaccggccgaaaggttacagttctacgccaagcaggggcagcctgtgatcatcccgtagatcctgcataccctgaaggccgatatctcagcaattacttgctccgagtgacctgaaggaaaaaaaaaaaggcttagaagccttctactgaccaattaccgcacagcattttcctaagagctgatgctttgaagttatagttcagtttcatttcattttttaagtcatacttgttagatcaagaaactttccgaaggaaagatgtatgatgatatagattttgaagattatttgttaatttctagcgcagatcattatttacccttgttgagattaacgtttttaacacttttttatatatggaatatggaagatgtgtaaatcattcacatggtgacaccagtgcaattgaggtaacaatggaatcacactgcaacaatataaaaatcattccatttaacttctgggatatttaaaattttcaacaaaagaaggctgtatatatatatatttttctttgcaacataatgtacatcagtgttgctcataaacgctgccctaattggtataagccgtattggcactccagcacggctaacaaataaaaccgctatctagtacaagatacatttgaatccataatccaacttgcttcatgttgaatttgcaacttaaaagtttgaagagcttattaacggcctgcagggtttctgttccatgacaagtagttgttgtcacccattttcctgaaaaaaaaagaggaaaattagagatgcaattcatatcagtgaaatgaagcagttctcaaaggccatcacattagctttaataagagttcaatgaacaaaacaacaaatcgaactcatttccacgcattagtgtgtgtgtgtgtgtgtatttttttattttatttttttttttttgggggggggggggggttctaaatgaaatgatgtgcaggactcctgcgtgttctgagacaaccaaaaaaaggctaagttcagtttgaagacacattgagcacatgaagcactgatgaggatttgtagcctagaaagggctcttttggttggttggatgaggatcaactaagaagaatttagttcaactccaaagtagctggtcaccaaacaaggcctaacaatgcctcaattatccccagggtacatgcgcttcttcaaatgattgcattacatgagaattgagaagttactcaccttggttttatcaagtacagcaaggtgaatgcaaatgccaggaagaagcagagtccaccaacactgagatatgctagaccaagaaaatcattctttccaccgagccatgtcgaggtagaaagtaccaacttctttttgccactaaagctatatgtgttgtagttgttctccaatgtcaccgtaatggtgtcacctttcttgaggtcagtgtgtatcctaccatacagctttctgaatgttggaagtgcagcagttctcatccaaacaataaggtcttcttgtttactcaactgcatagaaagtaaataaatgagtacttcaggtaaatactattattctaactgctcagagaattttcttgatctttaaatgggattacacaaaagtactaaaagcataattgcatgtccaatatgtatgtgataatctaccagaacagagaacataccgatttatttggatcaagtgtttttccacctataagagaaccattctggaagttctttggaaagacatcacgtccaaatttgtgctccctgtcactcttccaagagatgtttttcttgtccactggcaggttcttactgttgcgaacaaagccatatgtatcattgaatatgctccatgcaatcagaccacaaggaacaattgccattccatttgctgtaccctcgggatcacaagtggaggtgtcatttgcctttttgggatctcttagctgtgcatcactccggctcttgacatatctgtatgaaaaatataattcagcaagaaaaatgtcatgcaaggcaagaagaattatcatttcctaaacgcaaaacaaaagggcgagcaaatcaaaatgactatttccaaaatcaatagtttcttgccatctgtacagtagaggcagatgtcaatagtgcattcataatttcatggcttctaccagagatatattttcccacttctaccatgcataagatatccttttctttgagaaactgacttagaagatacatcatattgaggttgagcattataccggcctaaccaaaatatattgtgtatatcatgtagccattgtattggcttggtactgttcgtgcactactgtatttactgtaccaacagcaaactattcaaggaggacctgctggcgcggcactagttgtaattaaacataagaatgattagttttttagatagttgaatttatttccttataggtatagtccgtgtattagagatacagcttacataaaattttcttagggtcaagacaagtcttcccaagaaaaaataatgaattcataaggttttatcatttcagtcactaattcaatctctctgcactcctcttttctaaaataataatatccttcaagacattgttcaacccttcctctgcatggtagcaggcagctacctcgtgtgaaccagcattcacaacaattcattctgacttaaccatttcaacagaactgctgcataaactggacatatatcccatccaagggtttatttgtactgatagttgaaatacttgtgacatcagaaagtatatttgcatacctcctatgattctgataaaagttatccagctggtaatacacaaagattggtgcatccatatcctttggaacctggagtggagaccaaaattcgaccaaatatttcagccaaggattctttcgatacttaaggcaagatgcataatttcagggtatagaagaatatgcatgtagctaggctcatttaccttaagagtccttctgcagtttttgcttattgttgggttctggatgtaagcaagcttgtcagttgtattagctgggacacatgcatcatcgtatcgatcaacaatctcaacaacctacagcaaaggaaaaatgttagcaaaaaatgatattcacgcttggccaaacatattttgaagttcgaataaaaaatacagcatacctttcgtgaagccttcaacgaaacaagcccgattgggacaaaaatgactccgacaagaacgaaaactgaaatgacctgcgtaagataagcacaagcatccgtcaggtgattaaacatgccatctcactcaagctaaatataactaacagcaggcactttttttgggctagtatcagcttacccattttggagtaagaatcggcttgcaagctgggagctcctgctgagtaaacttggaatctgcacataaaagagggtaaataaagtaaatttcatagcgaatttaacaattccaccaaaacaatcatcccaccatctgaaaagatggcagaccattctaaattgcaaaggcttcgtcgatgactcaaaactccagttctaaagtcaaagccaactgctactattgcagataggaagaacaagaactttttaaaaaaaaaaatcctataacaataatgtcccagtctcgaattgaaatctaaattatagcatcacaactttcagtacttcagccaaattaaaccttacacataaaacatctaaacctcttcaaactcatataatctactagtactagtatatcacaaaggatgaaaaaaaaaaccggaaattattactccaaacccccgatcaaaaggggaacaaaataaaaataagaaaaaacgagaagcaacaacaaagataatcgcagcaagatctcacacttgggcttcctggtgttcctcctgggcgccgccgcgccgccatcgccggatccaccggagctcgatccggcttcctggccgctgctcatccccaaaccaaccgcttccacccccaaaaaacaaaacccgccaccgacgccaagaaccgcccttttcccttccccggacaccaaaatgcgcgcttttctttctttatcttctcccctctctcctcagatttggagatgcgggtgtataaagcggaggggaaagctacgaacttgccgtcctgctgttgttgcgaagattacaagggaagggtgggtttgactaggagaagaggtggtggtgttgtggtggtcgtggtggcctccgcgtttgagcttcttctcccaactccaagccggcggagacgaccgaagaggaaggtggaacgtggaatttgcgcaggaaactgtccgtcctttgctgcgagtaattaattatttttcttcttgagatgagatgagatgagattttttcctttagaagtttctaaattctaatcgcattcttttcagccctaaaattggattgggcggttgtgttaggtagagtagttgcattgttttggattttttatagggagtacttatttcttttgaaaaccttcaaataattgaggtaattgtttatttgactctattttaaattttaactttcaatctgattttttttttcttcttttccaatcgaagatgaaggttgacccatggccgcatcccacacgcgtgaattcttagatttttatttcaccgcatataaagtctaaaagtttcctaactaaaagactagcaaaacctttttttttcctaattgaatcctctgtgaattagtatttcatgaaataattttgggtaaatagtaactatcactttctctgtaaaagcccttttttacttatattatgtttttctagaataatagtttatattagccatttattttaatgtactccatctgtttcaccatgtaagtcattcgagcattttccatgttcatattgatattaatgaatctgtctggaaaatgctagaatgacttacattgtgaaacggaggaagtagtgtatgtaacatgtaccgacatgattaacaaaagcaagtgcggtgaaacctgaaatgaagtggagttgtcaacatcgacttagaacacgtttagacaaatatgatggatctaaattacttttctaatgtagtacgtttcaattggtggaccggtggcaagaaagaaagaaaaattgagaagataaaatagtgagagagagctggcataagaagaatgcacatttaggtgggttaaagtgacgccaaacatgaatttagtagatccggaggccctcaatgaccaagtattttacagattataaattgacaactacatggcttatacttttcaatggactttcttataatttttttcagttatagacttgagaatatctttattcttaaaaagttgtttgcaaacatactacataatatttaacacataaatttgtagagttagactgtgttcttgttcttaccccaggtttcccaattatctcccttattttccgcgcgcacgcttttcaaactgctaaacgatgcatttttttgaaaaaaagtttctatatgaaagttgcttaaaaaaatcatattaatccatttttgaaaaaaatagctaatacttaattaatcatgtgttaatggaccgttccgtttttcgtgcgcgttccagttaggaacccgctccagcgaacacagccttagtgggtataccagtgcctaacctgacattgatattgtgtctcgggaatttgcatagacataaatagacatattatacttagttaatttattatctctatacattatatgttcgatcttctcttttttatgttttaagttacttaaaaaatacccgtgcgttgtaatgggtaaagtctattttaatcgtattattgttatatatttttagaaaattatgagctacagttaggagtccgatcgtcttaagttagcatgcgagattcttatatgattccttctgtattaccaaaagtgaacgatcttaaaaacgactcaaatatagatatgtattttcaaaaatacaaaaatttaaaaaccgactcatacacggatgacataccaaaataccgatgaaaacatcttcaattaataatagagaacgatattgaaggaaaatgatattgattccattccaaagaaagtaaggacaacccgcacaatcagcccaaaagtccatggatctgatattgtggactggacataccaaaggcccatattgtcatgttcggtatatcttggccccgttttttttcggcccaactcttctaatccatgaagcccactaaaggatggcccaaatttatttcctccctcgtcacctcgtgtcgtactaaacttcttccaaagatcaatcaatttcgagtataaagctttggtcaaatgaaacagagcaaaatttctccaagttcatactgcttcaaacgagcgagcgagagagagagagagagagagagcctaacaacataaataggagtaaatctttccatcatcttccaatttcccaaattatttgatcacttgaaatttgaatgacgtggagtactaaataattccaaaatttaccagctcaaaaactcaaactttatacaaaaagatttacaaaatctcccccatataataatttaatactacggcacaaagcgccactgatccgaacagaacaggtggtccgatcgccacccgcctcgtcgtcttcctcgcgaactctccacccccaccaccatggcgatggcgatggcgatgcgacgcgcggcggcgctcggcgcgcgccacatcctcgccgcctcgtccacctcctcctccggcgtcctcctccgccgccacgtactctccccctctgccccccccccccttcggatgtgggtttagggcgcttgctgtgaattgggaggtttgtgcagatgagcgtggacgcgggggcggcgatggagaaggtacgggcggcggggctgctccggacgcaggggctcatcggcggcaaatgggtggacgcctacgacggcaagaccatcgaggtattttttgccctagttacccgtccccatcgcgcgtctcaggcaggcatagctccggttgctcttgcatcgctttctctgctctggtgtggcgacttgtcaaaaaaatatatattagagaagtcactaacttgggaccgaaactcactgttacgcttgttcgtttcgatgcctgtggattgatgcgtcgtgcatagaattaatttcagtcgatttatggattagtacagaacatgcagattggaattgtgggggtgaaactctgttggactgtagattaattggtgaatttaatgtataggttgtgaacatgcaatttgctcttggaaatccctgtgagcagttcgttgagctaatttattttctgcaagatgctttgtacctggtggttttgtttcacattgctaggtgatttcgagaggggcacttataacactggggtgtctaggtgttgtaatgggaaaatctttgtattgaatgaaagatcacactgtctagtgctgttcgttttggaaatctttgtgagggggttactgagtctagatcgctggagaatgccatacacttacttgcaaacataaactagctctatacctttatatttttgttagagcatatttgccatcgctgttacagagttaatagtcatgaatgaggaatgtagcgttgcaatttaagctcatattgtggcttttgatttttctgcttaggttaattttgtcaattggactggacaataagaacacgttgctattggaaagaactttatccagtgtttatatctctagtttatgacagtgttagttgttgatgattaaaacaccattcttttcctctcttaggttcaaaatccagcaactggagagactcttgccaatgtgtcctgtatgggcagcaaagaaacatctgatgcaatagcttcagctcacagtacattctattgtacgtcagaagtataaactacattcaatttttatgcttcagagttgctttagtaggcctgatctttttaatgttatttgattaaatttcttcgagaattcaatacatatactggatattttgaatcgaatgaaatttagtttatctcagttctgtttattcttcttggcaataaagagcactagttttcacatgtgaccgatatttttattcaccacaaatatctagttatatctcaaaaatgcttctagtttgcttagatatcatatagctcaacaataacccttactaatgtcaagtttggtacttagagcaattcataagtaagtcataggatcaataactactgcaatgtagccttacaaggtgaatatctatcaaattcttcttttgttgcaagcctttcgaaatgtagcactggaaaattatgtaaaagatttagaagacagtctgtactcaatggaataacctttactctatccaaatgcaaaggtggaactcaaactattagacaaaaaaagagtacactattagcaaagtgaagttagaatttcaaagaatcatctctccttttatatttgtttattcttatctgtatcaaacttgtcatgtttattctttgccttgtacaacattttattccacattcctatacaataattagaggtctgtttggatacaattttgctctctatataactatttgcaatgttcagaggttgtgggggagagatgttcccttgtttgtgatcttggatgttaagccggtctccccacccagcgctttggtgccttttgtaatagcactgcagtttctgtttctttctttttactgttttcagactctgtattttggctttctcccaaaagctgggtaatgaaaattgcattccatctaaaataactatttgcagtaatttggataaattgatttgcttttgtttgttgatcatattcactacttatactccttttgtttgaatattaatccttttctttttttagcttggagcaaactcactgcaaatgagaggagcaaggctctaagaaaatggtaatttttatgagcacatattttaaagatttagtgataacaacgatttttatgtagtattacttagatgctttttctgacttatcatattgcacgaaggcatgatttaattatctcacacaaggaagaacttgcacttctcatgacactggagcaagggaaacctatgaaagaggctcttgttgaggtactttctaaaatactgcgctgatattcgttagttggaatatgtgattctaaagccttactggagactcattggttgctataaatattcaggtcacatatggtgcaagttttattgaatactttgctgaagaagcaaagcgtatatatggtgatattattcccccaactctatctgatcgtagattattggttttgaagcaggtaatatgctaaaacattgtaactttattaattatgctcaaaataactttaaccccaatcacttaaccggcctgtttttattgcatattcaccagtttgtcttgagccattgtcaatttctatctgtaacatatatagtagtagagtacttgtacgatctactttactatctttgctgagcttatacatttttatgaaagaggaagagtgatataatcagaaatgagtattggttactatctgattttgcataaggtttgaacactccattactgaagtgtagcacgaactaataaatagttttcttgacctgctgtagcttatctttatctttactatttaatccctaccatgtgaaaatttacatataaactacatattatatatcttagtgtttcttttgttacagcctgttggagtagttggagctgttacaccatggaattttcctttagcgatgataaccagaaaggtctcgagcaatgcactacacttctgttcttctaaactgttcaaaagggagaaatagctaaggtagtacatgttattctcttatatgtggttttgtacttttgtgcaggttggaccagcattggcttgtggctgcactgtcgttgtcaagccatcagagttcacacctttgacagcacttgctgcagcagatcttgctcttcaagctggaataccagctgtaattctctcaagttatctgcaactccacttatgttcaagtatttactattactagcgtagttcacatgcaatgcaaggatataaaaaaaatgtgtattgtagtgataaatttcacagtacaaatataatcgttctcaaatctgaaaaaaacatgttattcacatcagaacaatcacccagtggatgatatacacatgcgaagaggataaaatactactacaaacaacacagatgtctatgtagatccatcaggattggtgtgagaagggatggggggttttgagcacattatcaccagttcaccaccaacccctttcaagtagtagagaaatctaaattcctctctgttattcgcaaatgaagaagttgtttttccattatctgttcattcatccagtggtttttttcttcttctcatgattccattcatggtcgctatcttgaacatattcttttatccagggcgcaataaatgttgtgatgggtaatgctcctgagataggtgatgctctactccagagtacacaggttctatttcctcccattcttcatcatatccgcaatattagattcttccgagttaataggataagtaagaacaatttttttttacaagataatatgcttttaataggtcagaaagattacattcacagggtcaacagctgttggcaaaaaactgatggctggatcagcaaatactgtgaagaaggtataaccgagaagttctgatgtttggacaataaaatatattatgaatgctgattctcctttagaatacacttgattgccacatgtctgtatgagtgtgcaaggaatctgggaagaaggtttcaaaaaactaatgctaactggacagttttttctttcaaccttgaaacatgtggtggggggtgggggtggctatggtatattaattttttttttaaatccacaaaggttatgtacaatgaagaaattacatatgaatggaaactggacagtactctcggtttttgcaaactcacccctaacactttttatttctttcggcctagtcactaaaaaccccataaagcatgtattcccccacaatgtctatatcactaattagatgtgctgaaagcatcaaatcttggaaaagcagccccaaatttgccatttggcagaagctggtggaaatgcctgcattttggaaccccctgatggtgtgtttttgggctaaacttgtcaaagcatgctaatgcacttagcctgcaaggttcctaaatggtgtgttgttcttagatgtgttgatatagagttctaaattttgagcagtattttggctagtaatattatatcatgtcaataatagctttgacatttctgcttttgacctttttggtggcatattggtcgcagttgcaccatattgtcagtgagtaaggtcatttcactttatgtaaattatatgtttttagtgaggcttttcaaaaaaaaacatttctggtgttcatgctgataagttattttacaggtttctttggagcttggtggcaatgcaccttgcattgtttttgatgatgcagacattgatgttgccattaaaggcagtgtaagcaaaaaaaaaaaagacttatctaccatttcaacatttttttttgtggtgtactttgtttctcattgatatactgaccaacatacatcatcattaattgcattttatattctattatgatgcatgtttatcaacactacttctgttcagcttgctgctaagttccgtaacagcggacagacatgtgtatgtgcaaacaggatattggtgcaagaaggtagatttttcatctatgacatgtttatgttgttagggcctattttgctctgttacaatagtgtttgtctcatctgtaggtatttatgaaaaatttgcaagtgcgtttatcaaggctgttcagagtttgaaggttggtaatgggcttgaagagagtacatcacaggtacataactgtgtctccatcgccattaaaattatagaactaataacttttggcaatatgattcttatattcattgcctagacaaattttatggaatgcttatttattagcgttgtaagtatacctaatgttacagcacttaaaattaaaaccgttcaccttctggatgaattcatatggaccaaatttgcctctctgctctgtgcattttgttatacctatatgacatacattttagaatttatctattcccaacttaggatttccatttcctttaatatgcagggccctctgatcaatgaagctgctgttcagaaggtataaattctgcagacttccagtaatttcccatattgttaatgttaagtaatagttcctcaaatgttccatctgcaatctgtttcctccaggtagagaagttcataaatgacgccacttcaaaggtaatctgaaatcatcacaaggatgttcattcccccctttgaaattagggtagggttaaaaaatgtaaaactgcactgattgctgcccctggccccatctggtttgttggtctataggctgtttgctggatttctcttggaaaacattaacttggcctgtaagggtatataaatcagctttggctagtacttatgttgtttgcctgcttcagttaaagactgggaccttgtttgttttcttttgtctgcttatctttgcaactgcacgtaagatacccccatcatccttttgcagggagcaaacatcatgcttggtggtaaaaggcacagccttgggatgtcattctatgagccaactgtagtagggaacgtcagcaatgatatgcttcttttcaggtagggttcaaaaattgtgatttgaccttattttagtgcatatgctttaccttcatgcgaagaaatgttcaatcattgagaaattctttgacatccttgttctagtttctaacaatcacatttggcttcagggaagaagtctttggtccagttgcaccacttgtaccattcaaaactgaggaagatgcaatccgtatggccaatgataccaacgcaggttcgttactagagtacagtatattcttaactatttaagactgtttccttaaaatttgctcttcagtgatatgcctagtcctttaaagaaaaaaagaagaagaagaaactgcattgtagcaagtcagggtatttctgtagtgagagacaaggcaactaacatggatgtagcaatatagaattttaaccatgtaggcctatctaccttaagaattcctgacagttatttatccatattagttcagtcatgtccttgttttgctttaaggttgaaatatgatgagaaacgatgtccatactgctaacctgtagaaatgcatcccctattgctagctgtacaaacatgacatgtttcccttgttccttccaatccctcaagaattatcttcttcaatgattaattgcaggcttagctgcatatatcttcacaaagagcatacctcgttcatggcgcgtttcggaagctcttgaatatggactagtcggtgtgaacgaggggatcatctcaacagaggtaagaagcaagcaccgtcccagataacaaaagctaagcaactccattctccttatggtccactttataaatgctgttctaacttgttttttcttcaggttgcgccgtttggcggcgtcaagcaatctggccttgggagagaaggatcaaaatacggcatggacgagtacctggaggttagcattgccattagacatgcaaattgcaaacacctctctggttttacgcttatcctgttcttgatcacattgctcggtttgcaattgcagctcaagtacatttgcatgggaaacctgaactgatccacttgagagtaccgtgcgtcttaaaaccgaagtacctggctggtgatgaatcgaagccgggggcaagagtagctgcaagaactgaagagcactgaggctacttgcacctgcaggacaggttagaaacttagaataataataagaagaaataataaaaataaagtggagtaagctaagccagggagccggaataaaaagttccccaatgagttgtacatgatgtgaaccgtaaagcacggcttcatctccgagctttgtttggtactagtactacctgagaaatcatcacgctactcatatcagtagtgtccatgtccaaagacaacaactttaattctactactaggaaataaaaaaaatggaaagcctctagtcaagcaacaaaaacaaagcaaaagtatccaatgggctcgaccatgagctgcatgaaaatcaggccttgcccctttgggaccattttgcatgatctcttgatgtattgaattgagttgcggttcaagaacttttctgaactcatatgcatgtggtctgattgaatcttaccataattgcgggattcgctacacgcctccgttttattgtatcgcatttagacatcgattcgttggtgcaaaatgtgggctttctagagaatttggaggatacccgcaatgttctgccaaccttttcacgtccttccttttgaggcgaggccccaaggtttaagatttcatttcagtttgtgaaatttcagacttatcagtgcacccggtagccagctcagttgattctcgggataagtgtattatgacctcgtgcaatttgttgagttcaataaatctcctgttatctgagaaaaaaaggttaagctgattctggtaaaaggaattgtgataacatttaaactccctccgttttactacttttgtctcaaatttagggttaaacatggatattgagaaaattggtggagttaaatgtgggatggttgtgattagatgagaaaaaaaatgtaggtgaagttatattttgggataaattttgaaggctagaggttgttatatatttttgtattaacggaggggtttttgatttgtttcttactcaaactaatttgatgctatagatatatctatcagctttcttttataaacttgattaaactcaaagccacagtgatttataatatgaaacatggttttatattttaggacgagtgattgttgaatctcccaccaaatatggcgtggtaccaaattaccaataccattttgcatgaactccatcaaaaccagttttacttatatatactcctatacatcatgtcgtggtagtatttggaggaggaaaaagcacatgaaataaaaatgtagatccggccggtcaccgggatatcctctcgagtctcaagttctcaacactcgtaatagcaggtacaatagcaggctataagctagctataaacatattttaaaaagataaaggaagagagagaatagtagcgggctacagatatataagccagctgtaacacggacttcaaaacgtaatgtgtgtatgacagatgggaccatgtactaattgtatagtaaacaactattgtagaattggctattacattggctatatatgatttggagctattagtgggctatactattaaacttgctctaatatagtatcatcattcataatcctctgtcgctctttggcacctaccgaggcaacaagaacagacaagatattaaccttactactctacactgcactgcactgctaccaccactacagtcagcagcagctaagctagcaaagcgtaaacgaagcttcctcttgcatcaatggcgcctttcttcttcttcttcttcttctctctctttcctctctttcacccaaaggctgcctgtctcttgccagtgggacccacctgccagagaagatcagaccggaatccgaggccaggatgatttgcctcgaaaattgtgctctcagtgttggacgcttttggagttctctcccgtccgtagcatagatcgagcatatgggttcggttcaacaagaagcttccttgaaatctctgcatctctctctactttatctggtctctctgcatttcccatgcaccaataaagagtgcttctactgagggcctgtttaggtggtaaaaaattttgccctttcatatcatatcacatatacagacatacatttaaagtattaaacgtagtctaataacaaaacaaattacagattccgccagaaaactgcgagacgaatttattaagcctaattaattcgtcattagcaagtgtttactatagcatcacattgtcaaatcataacgcaattaggcttaaaagattcgtctcgtaatttcttggcgaactatgtaattgatttttttctacatttaatactctatgcatgtgtcaaacatttgatgtgacagtgtgaaaaattttgtttgggaactaaggcctggtttagttcctcaaaaaaaatttcccaaaaaacaatacatcgaatctttagacacatgcatggagcattaaataagatttttttataaaaaaactaatcttcctcttatacccctaaaaaaataggctagcattatcttaatgcattcacaatatacaaagcagcaagaatatcagagccgcaaacttagatatatacaagtgtatattgtagtgacaagtggcaactactacgcaagccaacatgacgttatatggtactattgatagtatatacgatagcattgcaaagaacaattaaccctccccagagaaaaaaaaaactaaaaggggttggaaaagatggaaagatactcaatgtgcgtctgcctcattcaaggtatggaagggtatggtgccgggcatcgccaatgcttcaatataatgcttgttctgtggtgttcttcgagtctattttggtccatcgctcacctatatctgcatgtcgacttctatcgttcttcctttttctatgtataggtgtcaacttcctccattcctccttatctgtgctatctttggccggatattgtttaattgatgttgcatatagccaatctgatcacatttctgatatgctagaagatttgttccttaattcgtgagggataggctagatgatccacagattaaatggccttctttacaaaagaaaaatctgaaataacaatgcatataaacccaatccctatggtacacatataaataccttgaagcattttcagagagcttccaacaacggtatatacaatgcaaggacaaaatgccaactaaataacaagtcttttttcccctttttatgggccttttaatttgtcactacacaccttatgtacatgccactgtgtgcctcgccttgttattctgttcgcgatgttgaattgttgatgtagaccgtcggatctgctaaagcatgcgatcctcaagaatatttgatcaaatgggttgatatgagacattagagccacattgatcaatctccatgtaacaaatgtcatgtatatatgtactttaatttccgtaaaaggccacaatcaatttatctctaaatttaggatatagtataattttaactctcaaacccactctacatacctaaacattttgattccttgtatttgggcagaccattctcgcttgaggacaccgtatattgaatttgtggatctttgatgatcttgcgatcacaactttgttcaaaaccgccaaaatcatttgtgccatgtgccctaatttaactatgtgaattttgtaccctgagaatctaggcgcatatatatatatatatatatatatatatgcttcttaagattaatttaaaactaaaagtaaattttatgaaaccccacctattatggtctaagtcgcaaaaaacacagggattatggtagatgatacattaatctagatattatgattataatgtttcataaaaccacgccattatcgatttgacatattcatgtaccaaaatttaaaaagctgtacttacatcgacgtaacacttatacgatggataaagaactcatgaatttaagatatatgattgtatagaaataaaaaaatatgcacgtagcatatatcaaagtcaatgatcgttttgtagaacattatagccataatacctggggttgtcacgtgccaaaacccttatggttttgttaactccaatcataataactgccgtaggtgaaatttaggtggtgtttagatccagggacttaaatttagtctctgtatttagacactaatttggagtattaaatatagactacttacaaaactaattatataaatgaaaactaatttgcgagatatatattttaagcctaattaatccataattagagaatgtttactgtagcatcatataggctaatcatggattaattaggctcaatagatttgtctcacgaattagtccaaaattatggatgggttttattaatagtctacgtttaatatttataattagtgtctaaacatccgatgtgatagagacttaaaagttttagtcccatctaaacagggtcttactactccctctgtcccataatataagacgatctgtctagattaattgtactaggatgtgtcatattcacctaaaatcccttatattatgggacggataatcctaagctgcagggacagatctagctagcaagttttcaaagttcccatttcaattatgctgttgtcatgaaccgaattcgaaatacgaatcgttttgcgtgtagtacgaatacactcttgctttgattttcctttttcctcccttgtctttcttcttttcctctttacatggctgtagaatcatcatcatttcgattaggcccacacggccacacatgagggggcttgattgcaaaattacattttgataatgcttaatttcatgcatgcatgcatgcattatgcatataagctcgttcttaatttggcttaagctaagccagctagataggagtactatagtgtgtacttatcttgctagaagtaatatatattttttccttgattccatatgtgtagtatataattaatcacacacatataattatacagaattaataaggcagattcgttttgcttttgctttgcaggactactttgatgattcatatatattttctgcaggttgacgagatatatggagggagtatatatgtactatagtgaaggctttgtactttatatcagatatatatggagggagtatgtactccagctcccattcagaaatgtacatattgttttatctgggaatattaatctactgtaaaacttattatattatattatataataattaacttggaccactgatatatatttacctatattttacatatggtcgtattaatcgatcgatcgcagctcgtattgatatcaaaattccatatatgggaggatatatatgtagcacaaattttctgtattatatttattagtaatacagcttattaattgagagatggatgccatatgtgtgtgctcattaattaatatagttatcttggaaaatgtatatatccatcttgtggcatattatatatatattgcagattaattgatgcggcaacgttttacagagctagaacaaatattgatcaatcatcaatgtatatacacacatctagctagtgaactatgcataaatggttaatttatttgatgaacacatacatatatgtgcatatatatattcgatcatatgatcgcatgaatgaaccttgagccgaagctatagtctatagacgactaggtgcatttagtttttcatatttcagaaataaatctcaacatatttccataatcagtaaattaaatacacgtatcaacctggaatttaagttccattaacattgtgttttttgatcgaccgacatacgcgcatgcagcctcagatatatcaatgaaagcttgtttctttagcatgcaagaatgccaaatataagttacacatttacacccatgatcttgataattaacacaacacacaattacacagaacatattacatgcatcctcaaaatagataatcttaattagcatttgggcatcatcatcaagcatatatatgatcgatgcaccacaataccacaagatcatcctgattaatgccgcattaataataatttaccccctgttgctaccaattatatatccattaatccatgcatgaactcgagctgtaaaacttatttagccacagttcgatcgatcgagcacgagccaatttaattaatttcctctgctgtgattaactggtttaattagttaattaactcattaattaattaactaattgtgattacccgtaggataggttcctcgtctgagctccggccatcaccgacgggctccccagctgcggcggccgccgcggcgacggcctctccagcttcgacgccgccgccgcgacgtcgtagccgccgcccttgctccccgtcgagtcgccggacatgatcggcttcgtctcgtagacgtcggcggcgagggagtccatgacgtcgatgccgccgtccatcatcggcggcggcgccatctgcagctgatgatggccgccgccgccgcacttcccggccgggtcgtcgtcgtcgtcgtcgtcgtcgacgccccacatcatcgggctcttcccggcgccgccgtaatgcctcgtcttcgccgccgtcttccccagcgagccgccgccgtcgccgcaggcgaagaagctctccatcgtcgacgccggcggctgctgctgctgcaggtcgaggtggccgccgccggcgccgccgtacatgtggaggtcttgcagggaagggaagcccatggagcacacgtcgagcaccgccgcctggtggttgcctagggatttgtaccccgccgggccgcacgccaccgccgccgcgacatcgccggcggcgagcgtctgataggctttctccaggatggactgcatgtacttcccctgcgcttcgatcctcatctgcagatgcttctgcacctgcatgtcaccaattagaattcatgcccaattttaatttgttggacaattcaaattgtccatatatatgcatgatgatgagctttgctaattagggcataattattagcctaattaactaatcttgtagttatggtaataattaagtagtataagtaaaggttcatgagaatgttgaggtatgtaatttaagttgttgatgtatgcatgatgagaagctaagctggctgtatgtatgcatggcagcatgggaatgaagggcagaaaagtggataggtaaacttccctggtgctttatttgaaaggagaaacttgatgaaacttcatgtgaatttgttggtgcaatttaatttgaatgcatatgcatgtggatgcaacgcttttattttgttaattacctctagttgctcatgtagccttctttgcacctccatctgcattctgatggcatcgttcacgttgcggctgagagagagaatttcacacacaagcaaacacaaaaatggagttaggaaagaacaaaaaaaaagagtaactgaacaaggactaagaaagaaattaaaatcttaaaccggattaattctacagtactagtgtactgttactagtgtactagtgtaggtgatctgtgaaaagaacttactcatggttcatgcttctgcccattatgcctgaagaagatgctgcgtttctttgcatctccattgccgcggctgtggaaaatttcaagaacaaatcagtcgcctcagactatcagttgcactggtggtggaaattaagttataacttcaaattcaaaactgaaatcaatcacactgcatgctagaagatcttgattaccttccttaactgagtgctcgctgaactccttgtgcggttgcttccctaacctgaatttctgttcatgatatattcaggaaaccaaaaacagatttagttaatcatccaacataagaatatagaatcatatagatagaaagagatcgaggaacaagctaagctaggagaaaaccctagctagctaaggtgtggttagctagctaggttacctggagatggctcttgaggtggtagagggtgaggcccttcactcccatcaccctcatgatcgtcttgggcgtcgcctctgcgacgacaagacgatcatcaattcatcgtaagaaagaagagattaattcttgtttcgatttttttggagagaattgattgagagattgatgatgcgtactgtcggggccgccgagctgggtgacggcgtcgacgaagcgctcgtggagctccaccgtccaccggagccgcggcttggggtcggtggtgaggaccaggccggagtcgccctgcacgcacatcgccgccgccgccctgccgccgccgccgtcacccgagctcaccgcggcgccgccgccgccgcccttcttcgagccagggaacattcttctatgatctcctctcttcttcttctctctctagatctctctcgaattaattctctctctctataataataataactctctctacctcgtcgatccttgatcctgcccgattggagacgacagattcaagaacaaggaatagggttcgctcgctcttcctctctctctctctctatctatggcttgatcacacttgtagctctagcttgtgctcatatgctctttagtctctctctctctctagatgggtttctctctcactctctcctcttttgcttggggtgatggctttgctgcttcttcctttttttttgtctgtgtgtgacacaaactttctctttctttgtttctctctctagctagctagctagctagctaggagtcttctgctacaaagcccaagggtgatattctctatcctggccgggaaaaagccaccaaggccgaccccaactccatgccttcaacccctcctttaatttgccaaaagatgagaggggctctcttttggttttaattgagtagtgtgtgctcatataatatcctttcgacaacatggttagtatatatagggctacatatatgtattactagctaattatatagcatataaatttttataaattttataacgttataaaataaattagatggataattagaatcgctatgtaaaatactggttgttgcaaaaaaaaaatgtaaaaaaattatgagaaggtacggtttcgaaacttcaatagttatcatgatagtaggtgcaaatagagtaactaacacatatctagatataatttactcatagggcttgtttggctgccgaggctgccgcagccggcacgaacagcgccacactcactgtgcgcagtcgcaaccgtcgcagtcggcctgctgaacaggcccatagtacgtgaagcagtaccggacattgcaccgttttttggatcattacatagtctttccaattctttttacacataaaataattttgttgaaatgccttaatccaaagaagttcttaggtctggcgtaaaggattcctataaacagatattaaaattggatcaactgttatatatgcttctgtcagtatatgtactataatgtaactagtcattaaggatgggacacaagtaattaagtacatatatatgtgacatgtgtttggaacacatttatgtggatcttctccccctgatctttgcaatcttccacccatctctttcagaatcagaggatgtaacagttagtgcatgaaagcatatatagttaattagcatcagttttggattaaactgtgccttttgctcggcactaaacagatcatgcatgattttgtctttgcgtgcccccacaccattggatctatactctctctgctttttatatttccctctttggcactagaaaacaaaccaagtaagctagtacgtactgacctttattttgtacttatagtgtgtgcataccaggtccctttttgaccagggagcatcggtgtttttacattaaatttgttgtttttttattaattaatttgtcgatgttgttgtcgagatttgtcgttctagacatacttttgatcattatttgaccaaaaactattaagagcacaatgagatgtgaaagtacgtgttatttcaacacacgacgacttaactgtcgttctacagcgtcctaaaatgacatttaaagcagaaaatctacatcaactaccaaggaatgtgggtagtgtttattactcactccagtttcattttaattgacgttttgaacaatgacacggtctacaaaatatatctttgacattatttttattataatacatataataaatatatgtatgtttacttttattatagtgctttgaaagaaaaatctatatatgttgttctagtccctttaaactaaatatttttaaagttattgatggtcaaaattataaaagtttgacctcaactttgtctaaaatcgtcaatttatatggaaccggagggagtacttaattaacctttgattatttgagctgataaaccttataaaaataaacaaaacaaccaaaagaaatttatatgtaaaactttaatatttatattgttagcggaaaactataaaatagaatatgatgaaaaaactctatgaaaaaaactccaaattttaattttggttgacaagccaataattaattagacggcgagaggcttataactacctacccctccgtctaaaaaaaagaccaaccctacctaccccttcgtagctaggaattcgttttttctggaatggagtaatgaaaaaagtccatacaaatttaattttttttaaaaaattgccctttgatttctcaccaaatcaattacatttttatggaaatactagcatcatgtccgtgctttgcaatatatcccaagttcccaactgaatatactataagtataatacaaaattaaatacataattaatattcttcacatgtaaaactatgtaaatatgtgttttttattaaaaaaatctttcaaataacatagacatgcatacatatttacatacacaaaattaagatctacaatggaaatgggggcaactacaaaccatcatcacccctattttctcgtttaaagaaaaaaaacaatatatcacatatcgatcatcagacattccgcataagttacatatacacttctgatctatgtaaccttcactacattggggtcaatatatatatagcttttttttagaaaatgggataaacccagcctctacacaatatataaatagccagtgacttgccttcagaaaaaaaaaaaggagctagacatgcttacgtatatatactcccaaaaggaccaggtagctagtacaacatatattttaactatctaacattcagacatcgaccatgcagcaagcctgcaggaacttatcatgtgtaaatcattgcaatgtaaaacatattttgtaggaactggaaaaaaggatgcaaatgcgttgagcctagagctcgacaagtttggacaagaagagacaccaatcaatgcaacatacatatgttcacccaaaagaaatcaaatcaaagtccccatgtcttccaatattgtagctagccactcatcatgccattggtgcccatgtggggcacttagaattcatgcaactttctctttctcttctttccattgctgactgatcttgaatgtggtgtcagatgaccagacaattgatatgttctgcattagaatgagaattttatcttatatatatgttgcacttgagcccttgatcatgcaacaaattaattaagcagaacaagttagggaagctggtgcatggtttcatatatataatgaaagtccctaattgttcacctcagaaatctcgtttatatttgtagaaaaatattaattaggtaaacatatatatatacatatatatatatatatatatatatatatatatatatatatatatatatatatatatatatatatatatatatatatatatatatatatatataaaatctattgcagaccaactgagtgtaaaatacaagagaagaaataaactgatagggaagggtgtgagaagacattttgcacttgttaacaaatgaaccctaatgccgcctcttgctcgttcgcgatataatatggtatttttcgtaaatatcaatatgttactgcagggtaaatatcaaaattttgatggtatatcaacctatgttttctcttatcttgctacatgacacatgacaacttgtgtgtacataatatatatatatatatatatatattaaaagagaaaactacaaaagatcagcctaatagatattgatgctacaagggaatcaaaggagcacatgttcttcctcaatctccctccacatgtgcttgcatgcttacgtcaccactaaagcattcgccaacgacacctcaaactccatgcatgaaaataattatgaaagagaaagtgaagttgtgagaggtcaaaaattagggtttagcttcaagcctccaagaggggtcccatttaggaagggaaagtagagaggatgagtaagaacattgtaaagcgcccgtgcgctgcctcactgccattttctttatctacaagggaatatatgcttccttctttgacaattaagcaaagattcttctcaaacattcctcaaatgtggttttattttaacagtattgtaagaactagaccttgtgcctttgcttaagcaataagaaatcgatcgacaagagaacacgggactggagcatgcgaagaaatacatacgcagcgagtgttgtcgatgctactggttattatcaagagagaagtcttagtccataaaaattaaatttatacttgtctctctattgaatttaaaatttaaaattaaatttatatatccctattgaattcaaattaagtaagcaaattataccactcgactactatgctaagctaatgaagataaattaaatcatatcaagttcaatttaagacacactaagggtacaaatatatagtggttcagagaggaaagggatgtcccatcctccctaatatctcaagcactccatattggtagtaccacagcctttcttatatttgggaaaaatatcactacaagaaaccaggattttcttggcggccaacatattttatttgcggtcaaaaaataacggccaagtttaattaccctttgtcttgatgattaaaactagccacctttgttccctaacatatgaaacaaaactttatttgagtctcatcataccctcatttcacacatgtttatatatataggttctgaaattcctgttgatatgtatatatttcatactacctctgtttttttaatagatgacgccgttgactttttctcacatgtttgaccattcgtcttatttaaaaaaattacgtaattataatttattttgttatgagtttttttatcactcatagtactttaagtgtgatttatatcttatacatttgcataaaatttttgaataagacgaatggtcaaacatatgagaaaaagtcaacggcgtcatctattaaaaaacggagggagtatgtttctaggcctaattaagcgtgtgtgtattagtattttttgctcacttgtttcaaacaatgccaatctcaggtgcaataatcggacggaatacatgcaagttcttaattattgtgtgcgcgaagttatatgaggtaattaaaataatcattggttgaatatttgaattgatggatatccatgcacactgtaaaaatctgttctatcgttaattaattaagaagtaaaattaacaaccatagacatcaacatcaataatcgtttaaaatgcatgtaactttctcatgatcactcggtctctgcattcttttctgcacggaagtggaagaataaagacgatatattctcaagaacaacgctatataatagcagccttatttgagcatatactcaatttttaatcagtgatgtcttgttttgttctcgcaaaagataatggccaacagtccttatcctgtagccaaaataaccttgttttgtctttttcatggatgcagagagaaaagacagcactaccgtatcgaagtcaactaatctattttaagacaggcatcaaaatctaatgacgctatttctgataaatttcagagcctttatactgatacatatgctgcttaagcggctgtggttccattagacttctctgagaatctcatcaggtacacaaactaatagctaacagaagttttcagatagtttcttctcaagaatcttagatcttaattagcaggtattaactgaaaaaaaacagaggaatgatagatgcatcgtctagctaacaaaattttataatgtatcagttaattaatggaactaaaatgcactataacatagtacacttttattttattaattaattattaaaatttctaggcgtcatttggacaacatatatataagcaaacaagatgtgcttataggccaagctaagatatatgtgtgtgcgtttataccggtgagtgcatgcacgtgtttatgaacgtctacatttatactttatactatgtttttagaaacatatcgagcaaacaaccatggtccgagagctgtgcttgtttgggatgtaggagaataatgttgtcaaaattatttttcatttactatcggaagttcatatatcagattcatttccaaatatatatatgacaaattaatagaaatgaacactcataagtagtgtatttggagagaacatacatattataattggtgtttaacatgacatgttgtgtgaccggagggtactataggttatgtaaaagtggtattaaccttcaactcattgattaatataagctaaaaagagtaaaataatcctatccacatccactacataattaagcagttagcttacatttcaagcagacatttgcagaccgatggcttagctagctatgacaactttgttattttcttattgatctgggaggttctcctttactagtattcatcatgtgcaaaacctaatactaaattttagtgatctgagaaacaacagattcctagctatagtaagtgcagttacgaagcaaaccaaatctagtatctaagaagcaaacaataactgatcatgtttaatcatcccatgatgatctagctaggcacagctaatcagttagaagtgtatacagcgtttctttatctctaaaaaaattgcagtttatttgtgaccttagcaaagcaaatgcaaattaatcactagagatattagcacatatatgaagaaaagtccatctttggcctcacatgattaaagccccatacaaaataaagtacatcttccaactttaagagtactttaatgtgtaatactttaagttctagtaatcatagtgtagcatattatctctccaggctaaacatttggcaaggttagcgtgtgaacaatcttggtttgattgtcaatggctcaatgcagtatactactatcgtggtgaaattaaagagacaatcgaagctttggtctaaaggaaatctatggaagtgtctaatgtatatcctccccttttttcttaccttccttttacttttgtgtgatctttgaacaggagatgtgattgccattagggtcccttttcggttatttttgtagtttgcacaaagcggagttcatatgatgagctatttttgttttggtttctacatgattaattaatgcaattaagattgtgttcatgttctttcatacttaatacttcatgcatataatttgatggatgaatgtattgtgaactatatatgtaataatttggctatagtacttctaacttgcgaactatgtaataatttggctatagtcgtttctgatgaaacaaattaaatgccaggattttttttcctttaacaaaacatataattaaccagtaatgtatcagaattaatataatggtagtcaactgtattactaatgcatggtggcccgcgcagattgcgcggctagcagcattatattttctctcatacaatagtataaatgttttctcattatattattcaaatatattaaaatgacaacataattttaaattttgcaataactttacaaaactactaatgtgtaatattcatattgtattttatatacgtgttagttattaattatttttaatatcaaattttagttatttgtaaattatatatttcctatatggactctagactcgtcttttaatatttcttttttttaatttcgaattttctgtaaattgtatttctatatagactctatgctcttcttccaatactatttatttttatttctgaatttttattatttctaattttatttctatgtggacactaaactcatctttcaatattctttaatttttaatttcgaatttcagttacttctaaattgtatttctgtattgactttaaactcttattcccatgtttttctaaatttcgaactttagttatttgtaaattgtatttttatacgaactctaaactctacttttaattttattatgttcattctaaattttagttagttttaaattcctatatggactctatactctacttgtaatattccttattttttaattccgaatttctattttttttcttaattgtatttctatatggactctatactctacttttaatattctttattttttaattccgaatttctttttttcttaattgtatttctatatggattctatactctacttcaaatattccttatttttaatttcgattttcagttattttctaattgtatttctatatcgactctatactctacttctaatattccttatttttaattccgaatttcagttatttcctaattgtatttctatatggcctatatactctacttttaatattccttatttttaattctgaatttcagttatttcctaattgtatttctatatggactctagtctcctattctaatattccttattttttaattctgaatttcaactatttctaaattgtatttctatatagactctagtctcctcttctaatattccttattttttaattccgaatttcagctattttaaattgtatttctattctatatggactctgtcttttctttttctccgattaatgtgagaatttctaggccatgagagcgaacgtggaggctcatttttctattcctttaattatataatagatagatttcaactatttctaaattgtatttctatatagactctagtctcctcttctaatattccttattttttaattccgaatttcagctattttaaattgtatttctattctatatggactctgtcttttctttttctccgattaatgtgagaatttctaggccatgagagcgaacgtggaggctcatttttctattcctttaattatataatagattagcaggacctccgagattaaaattagtcagttactaatttcaaggtgtaaatggccggtttgaactcagagcaagcttgtcggatctccggtcaagagggattaatcaaatcgttttctcccttcttgctgcactttttacctggctaattaagctcatcatcaaccggcctgtgactgagtgacgactgacgactgaataagcgactctgagctttcaagtgtccatccatgtcggcttgattttcactttaatttacaactctctcccaagtccaaaccaatggcctccatggttgaaaatatttccctgcgaaagtgacgatgcacttataattgttctttgactcccacacatccttgaaaaaaaaaacatactacctccaataacaaatatagcgtttttatgttgttcagtaaagattaaaattgagaagaaaagaattttgatgtcccttgttaaatgactcataagtttgtaatgggatggtgggatgaaggtaagatcagaaaaggattaaattatgaaataatctgaatgaacaaatttcagatgtttgtaatatttatatttgtggacagagagtgtatatgtaaattcatttcttgtaattagatagtactacatatatacatatgcaattttttcgtgtcatttttctctttattaggaaatgtggtttggctaagttcgataaataaatgtacagtgcttaataatatgttgtgcttactaaaaacacatgggcaatcagttagtcaagaaaaaaaaattcctaagaagtaattaataataactaagaggtccagagaactgggctccagcctgatagtaatccaaagttacacttacatgggcgtgaaggcagttacatgggctgcactataacaaatgtagtcatgatctattgggctgggccaagttatttcagatggcctaattacggcctagtaagtatatgcttcgcaatgtgatactactatttttctttcaattgcataaacgatgtgcacgtaaacagcacactttgataatgaaaagaaaataataaagtttcagtacagaggctaattcgtgctagtttcaaataagagtagtaaagctcgatggtcagttactgcgtgaatgcaaccaaaataagtgagagtggggtattcttaagatatatcagatcagttttccaaatatacttatagacgtaggatgtgtatgtgtgcatttaataggggtgactgtatgcatgttgtgagtatgtacgtttatatatttctcaaaaagaaactgtatgatgtgtcccttctatcgtttagaattaatcaacttttgttcgcattaccatcattttggattataagccacaacacttattagaaaataaaaaataatttatgaatgaaatttctatttactatgcattttgcactacaactatatttttattttctttttatcgctcaaacagattaaaaaaaatcacttatgacaaaaaaaaaagagccacccaatggcaaagtcaacaacatcgtcaagcctaagcgacaaatattttttacgacagagattttttaatgttgcgcgcagttgatataatagtgacgttagcggcacagcctgagaccaacggagagaaatcaaaatgtctatttttattgtgatatatctttttttttcttcttacaagtccagtcgcaattgactaagatagagctctgttcatgatgtgataatgggaaatggcccggcaccaaacgacggcgccactgcaggtacagtggctcaatcctgagcgtccatttttgcatctttcgagatcatatcattgaccccatcgagatcgtacggctgtgattgctccgtcgacatgcacattttgccggttaacgcctaacaataaggccatctttaattacttctctctagctacccgaataattaagcaatatacaaattctgaaccttaactacaagagtgtcatgtgattgtctctgaacttggaaaaaaagaaaactgaatatttggtggtgttgccgttgtttccggagacattatgcatgtgtggtgtgtattagattattttttccccaagtgatcagattaagaaattactacaacttgagctttaactaggtcaaactgtctaaacatcaagccccttaaaatgagttaaggaatttcatttcatgttgggaaaagcgtgttggaattgtggttgcatctcactctgtattcaaggtcctgagatcttgatgaaaaaaaaaagatggctatgcgtcgatatctaattggtacaaagattcgaagttataatttcaatatcataaaaaggacgtcgaacgagaacccagcaaggttccatgactatactaataatatttgattttgcaaacttaatttacatgaaaaataattacagaaacaacaagataaggcatgatcagagcttgtgaatataatggaggccgagtcggaatcacggtcacctccacatcgtatcattcacaacactatcatctatacctttctatctttccatcaatcgaaagtgaagaaaaagataattcgaaacaggaattaatggagcaggaaaacgacctctgacctccattattctttatgctgggaaagattcagcactcactatgctcagcttctcaactataaacaaatttgagagtgccccactaacagctatagctaagctagagagcttaatcaacaacatcaattggcctattgggcattctttaattaatttcaagagagggatatgcacactccccatgttattttttttttcaattaaaagaaacaatagcgcacatatgctatgtggacacactttttgtaaagtgtgcacacccccttatacacgctttctaacagaggagaaggcttgagataaatccatggaaaataaataaataaaactaactgattttgcttatgcttaatctatcataagagctaggatttataacttagtgattagagatggaacaataatcaacaacttgcttgttactatgatagtctataagcaatcaacgtactccctccttccctaaatgtttgacatcgttgacttttttaaacatgtttgaccgttcgtcttattcaaaaacttttgtaaaatgtgtaaaaatatatgtatacataaaagtatatttaacaataaatcaaatgataggaaaagaattaataattacttaaattttttgaataagatgaatgatcaaacatttttaaaaaagtcaacggtataaaacattttaggatggagggagtatgatttattttttctgttatcttcatttatttttctctatatatatgtttgacaaaagaaaatcacagggacaggtgtctctgttttggatttctttttattatttgatgcctctaatgaagttataaaatcaaattatatttaaattgtcaacgaaaggaaaacatttgacactcgagtgtttctccgtgattaccagtgtggtaaccaaggacaatttcatgaaatttaatctgtgcaagacagttcttggcacactagctactaattaattaagtacggcataaccaagaaagaacgagctacgagacttggtcgaagcaagtgagtttgttctacccacctaagtcgaacacacttaggcaagcacgatatgctttattttatttgtagaaatacactagtaaagtgatcttgctggattctaaacaattatccctccgtttcaaaatgtttgacactgttgactttttagcacatatttgaccgttcgtcttattcaaaaaattttgtgaaatatataaaactatatgtgtgcatgaaagtatatttaataatgaatcaaatgatatgaaaagaacaaataattacttaaattttttaaataagatgaatggtcaaacacgtactaaaaagtcaacagtttcaaatattttgaaatggagggagtatttatgtggagtatattacactgttagtgcttatgcataagcatgtctgtgtgcatatgtggtgtgattgtgacatacggtgttgcacccaccgagcatctgtttgaacctagaaatattgtctgttttcctgccgaactgaactatttaatgtgaaattcctaggaaatctactctctccacatcatattataagctatttttatttttttatatcaaactttttaaatgtttgaccaagtttacagaaaaaaaatataataaaacttagagcatcaaattagtttcattacatctatcattgaacatattttaatgatttttttattttgtgttgaaagtattgctatattttttttataaacttgatcaaatccaaagtagtttaataatttagaaaaaaaataaaaacaacttataatacgaatggaggtaatagcattttaaccttagcctaaactataccacgcgaaaaaaggcaaaaaaaaaagctcatttcttttatgtaagttgtgaaatattgtttgaaaagatttcaaaacctcttacaaaaaaggctaccttgtttgcagaaaaacaaaaacacttttgtttagcccaaaattaagcaaaaacaagaagaaagctcccaaataaattagcaaagacttggcttttttctattccccaatgacttcttcttcctcctcctctccacagtccacactgttcatctcctcctcccctccctcccaattcgattcccaaatcccaaaattgaccacccaaatccgcgccaatccatggattggatgcctcctccgaagcccacctcgccgcgctcccctcccctcctctgggactgggccgacgccgccgtgccgggctcctcctccggcgaggtatccgccgccgccgccgccgccgcggctcatccgggaaggcggcggaaggagaagcgaggcagggcggaggaaggaggaggtggtggtggggaggtgaggtgccaggtggaagggtgcggggtggagctcgtcggcgtcaaggactaccaccggaagcaccgcgtgtgcgaggcccactccaagttcccccgcgtcgtcgtcgccggccaggagcgccgcttctgccagcagtgcagccggtgagctcgccggagtcgcgcctcctcttcctcttcctctctctctatattgcaaaaaaaaaaaaatcaatggaagcacacagctccaagctcgtgcgtgccttccttctcctcgattactttctgcaaaaagattcccttctcttctttggttcttcgaattacaattacaatttacagtttaatcacacgattggttgctgattaatttgcgcgaagctcgtgcttttttacgtgggtggtgaatttttctggtgtccgtacggattttccatttccgtatatgggaggcagagatgctatctttccactattggtactgtgtgtgtgtgcgagtggtggatcctgctgcatggctgagtgactctgcaatgggttttttttttccagttttagtatggtacttgtcctgtgccttcatttttgggattgggccttgctgtgcagtgagcctgtgattactgtgtttcaatctttaaaattattactgtgtgtatagtattttttttaaagataatggaaatgatttacacctccggtctctctgccaacaagcatacggccaaggagtcgagaaaagataaataaaaatactcgaggttatgggacaaacccctatctacgccctgattatatccagctgattactgtgtgtagagtagaatcatcttctgtgtatatgtacttttttttttgtatgtgggattttttgtgtatcctgcgagtagtttatgcaacagtgtgctaatttggttttggtgaatgtttgggatcaggttccatgcgctctcggagtttgatcagaagaagaggagctgcaggagacgcctgtatgaccacaacgctcgtcggcggaagccccagaccgacgtgttctcctatgcatcggcaaggccgccgtcgtcattattatttggtaatttgtctgtaccttaaatggatttgcaacagcagttacttttcactatttagcttgatgtatatgatgtatgtgaaaaatggtaaattgttggtgataagatctttataaggttactcctcggcaacctccacctaccttatccttaagcacttgcatgttcttacttgatcgatgggactgagcttacatgtgaaaattattttcagttcgaaaattcttggttgtaagttcgactccctgattaaatttattttgatagtatcaggattactcgcaaagaaactctacaatatcagatgttctatcaagttttctataattataccctattttccctttcaattaagattttccttcacaccaaaattgaaatgccactgcagatgataaccgacaaataagttttgtctggaacaaagctccactcagccatgtaaggcctttcgcaatttctccatgggaaagctcatctgaagttgggacaactgatggacatatttatttggataaatctcacatatccaaatctctcccagcatttaacaccgacatagatgagctcttaccaatgaaaggtatgattttccaaagatgtaagttttcgtgaaaaatgtcatcaattaagactactttcatggttcagcacattgcatagatctttgaaaaaattcaacctatacactgtaccaaatgccaaattcagatgctgttttgtcattgttgttgtttgttaaaaaaagtatcctggagttgtgcacacccatgaaaaaaaattagacccttgagcacatttgggtttagaaaataagatggtgtgcagtgtgctgctaagcttatgtcactatagttgacgaagtgtttcaaacataaaagacaacagagtttttagtaagattctaattggaaaagaaaaaaaataccgtgttttgtgtgatagtaaacatcctacagtttcaactatataagtagttctcttgtggtcattgggcagagaattacttctccagttagcaatacaagttgttttgatttaacttgcaggtatacaacaaagaatgatgttgggcattcttttggtcctttgctctcttttgcccaaattagttatgttagatgcttttaactacagttaatatgtgcttggaagtggagcatgcaccaaaaaatggatagcaaatgccacaagtttccatatgaggctttggcgctaatatcgcatcaatgatgtgttagtttttgtgtttggtacaagtatctgtacaaggttttggtgccaacattgcatcattaatgcgcagctagttgtttcatttggtgtgagattgtatataacggcagcaattattttcatgtaatagtattccaacagggatttaacaggggcagtattgtaccaaaaaccataacttaatgctatgtgcttattagtctacaacgacttcgaagtgctgactagagggggtaattatatttatgctatgttttgttagataatggaatgctatggattttgataacaagaaaaaaaaatgcaaagtgattccagatagctgtgattcttatctctgacaaaacgagggaattccaatacttagcacaatatgcgaaagtcagctcaggaatgccctaaatttaccttattatgcctgttccctaaactctccgcatgcgggagaactagttaccatgctaaaattctacatactaccaagcatactgcaatttcttggataaccttgctaattttatgctaaattctcaaaatatatttcaaatgaatatgagccattcaatccatttccattgcagacttctctgcagccactatttggatgttcttcggtgtcctttttatccgaactgcgcaggagagctgcatgtcatttcattaaggagaaaacaatgtacatattttgatggaagaatgaccattattccattttgcaggtccggacgcatctttaactgcttcaaaatttgatggagcaccggatcttcagcgtgctctctctcttctgtcatctagttcttgtggattacctgatcctgtacagcaagcatctcgcgtcatccaattcacaggcgccagccaaaacaaccgggaacttcctccacttaatggagggaattctgcttcagcatcatgtgccaatgtacaaactatagcacaaccggctcagctggttcgttttaccatgaatgctagcagcaatgcttgtcagtccaatttcttcggtttaaaccagataaactaaaggcctggactgaaagcccgtcgtcgatttcgaccaatatccaccaaggtggccttgagaagatacaagaattgcttctatcaactatcagagtgcaaacaatgtcacagttaatgttgtcatcataaatatcggtattggtctcccctgaactaaaatcgaacggagtgatggcttgcttgtgttttcgataatcgttatgcagttctaattttttttctattgttttctgccaatgtaccgattttcaaactgtgggtcttgtcatttatacttgtacaacctaatgtcaaaatgtcatgtatctttgaaactgtttttgatggatttgggacatggtttcgcttgtatgattgttgttttggcagcggcatgtggtttcagtggtggtggtatgctttggcgccataacgtgctgttttttccccaagaaatgtaacttcataaacgtgtgcaaacagaatcgatctggcaatttgccacgttgtgcggggaaaatagaacaatcctttccccaaaaaaaaatctgacttatcctccatttaaattgcacttgttttatagaacgtgcatccgcataacatctcccgttgattgacgtaatcaaagaactatttaattgtatagttgcaaagtaaatgaaacagtcttgtctcctaaaagaaaacaaatcaaacagctcaagagtcgggggatggaagcagcagcatgtcaccatcacagttgtgttggtacaaatctgtcttgactcgtgatcttgtggctgaaatcttgtgcctactgtcaaaaacagcaacacaagccactacacagctcaacaattgtatgattttccaacagaagccaccaacataattgctcagatgaaaatttctaatttctttattacctctctgttgacgaaaactctgttgctgtcatacactgcaccacaaatataagaccatatgtaattcaacaccaagaacaggggcattcagaaatcaacagagcaggcttggttacaccaacaagcagatgttattaacataggaaagctccattagatcctgttaacatacaaggcaacatctatattccagaagagattacttgagctgtgcaactcacacaagatagaatcgaataacacagaagctcaaagcctaggaacttctgtgggcacacagaccctatgagctggtactaatgaatacattgagattgcctctttcttcatcctcccttgcttcctccctcgatccatgttgtaatcatctacattgctttaatttcagtcggttgtcatgggctcagtgatgcaacagcggaagcgtgctttacggacattgctcagaatctccatctctgcactctcaagcatacaaacgatatcagtaaatgcggggcgaacttcagggttcgcatcccaacaaagagtcatgatgtggcttagagcaggcaggcagtcctgcgggatcactggccgagcacccttgttcaccacagcaaaagctgcctgaacagccgtcatgtttgtgaatgggagcatgccagttataagctcccacaagacaatcccaaagctatatacatcaactttatgatcataaggcctgtgctggatcatttccctgaaaacaaaataagccaaccagctcatcaactaaatgcgtagagtaatattgatattgggttcttgtttagaaattcaagattgcataagaaacttgctactagtgtgtcaacagcaagacaaacacttatctctcctttcttttcatataacaaaagaaaatttcaagcaaaaagggaaagtcttaatgttattttctgttaatggtaagtaactataaccaattcaacagtgcatcagtatgaactaaatgggggccatattaaatacagaaagaagattgaaaacaacggacctacttcatcaatgttgtaacaaggttaatcaattcactatgccatgtgtaatcctctggtgtgattcagttgatttgggatgccacaaaacactaaaaatctggaatgagatgcacaaataggtctacataaaattcaactactccagaaaattgcagaaattgatgtgtacaatggggtatccaggtatattggtaaaatacaataatcctacatatctgaagttataagtgaaaccatccgcaataagtcagcaacagatgtattcaggaaaaaaaatcagcaacagattattgacaaacagacagtcagataccattctaaagtgaagtccttgcaagtgataagctatacatgagttggcatatacaaataacacagggagaaaaaaataaacaggggaatatataacttacggtgccatccagcggtaggttcctgtctctggtgtcataccctcagtttttacttcgatgcgagccactccaaagtcagcaatcttaatggatttatctgcggcaattaataggttatctgacttcagatccctgtggataaatcccaaagcatgtacataggccatccccctggctatatccaatgcctgttttacagccaatctcaaaggcactgacttgttttgccttcttgccaggaactgccggactgaaccacctttagcatactcagtaatgatgcaccacacaattgacttcctacatgcacctataaacctcacaatgtttgggtgcctcagtctagacaacatcataacttcttgcacaaattgttgctccaatgcttgtgctctctctggatcattctcaggcttctccagtagtttaatggcaacatcttctccattgtatgttccccggtatagcttcccaaaggccccttgggcaaaaggaacccccatgtccaacctccccaaatcaatggcccattcctcataattacttaggatctcagtcggatggctcggatccatcaaaacacgagctaacgcatcctcatttagcgtgtgcgcagccacacggttggggcggaagacactgttgccaaccgaatagcttgccgtcggggcatcacggaggcctgggtgcttaagtataaccgtgcgggactcgttcgagccaacgctgctgttgtccaccgacatggcaacggaacccccaacgtagttggccatgttgaagccgtcggcgctgtcaacagacatctgggagccctccacaaacttatggtaagacggcatgttgaagaggccattgatctcattatcttgcattcccttgccaccaccgcctatcatatcgtgaaaccttggctgcccgttcatgtcgaaaaaaaataaatccaaccgcaaatattatttgagccggggcaggctgttcatccttgtacaagaaatgccctggttgtcgctcccgctacctgcaaaacaagctgaacttagtgaattgaggcagaaacaacacaaaatgcacttctagcttagaatcacagtaacatagaccgcgagaaataacccaaaatgttcgacattaacagataaaaatccctactaaaaaactactagacctttctcaattccacgcaaaatctacaccgacgacctaaccctccttcctacaacaacacgaaacctcatatccaaaccctccccaacccgatcgcccccccccccccccccccccaaatcccctcccaaatgaaattccgcaaccaagacatcaaaaccccccatcaaattcacgaccctaaaaccatccccccacctcctaatcgcccgaaacccccctccaaccaaaccaacccccccccccccccccccgcgcccgattcgcaccaaagcctcatgcagtcaagctcacctcagcagcaggaaaagctgatcggaccagcttgcagccccaacccccgccgccctcctccgcagcagcagaatccgccgagcagcagccgcgaggggaagaggaagaggaggaaaccctaggcggattccgagtggattggcgtgtggttgggttggcttggcttcgcctccccttttgcttttctggagaccggagagcagagacgacgactccccaagtgggaaaagaaagagagagaggaacaagtcgttagtgtcattttcctcttttggggcaaatttcccgttttgccccccgtacttgcgagaaattgaggaaattgcccccccttcaccgctttggcttggccttgggccctccctctcctgtcattttcacggcagctataagagagaaaataattttggactttttagtcatatcgtgatgcgattttaatgcggtttgtttaaaatataaattatggtgtggagaagaagttaatgcaactgtgcagggcaataaattatggttgcttccgcagttatgatttgtggaacaataaatttttgcactagggagttattattgagtttaatggtgggggtgaagttaatgaagtatggtgcaaacttatgacaattttgttttttcctccacaaaaatgtatttatttagtactgctcatgactgaactctagtcaattaaagcattaagttgtcctacttttaatcacgtttaaaacttcttgtagcatcaaattatgtaactaattaaataagatatcattgttaagcatcaaattatgtaaggctgtgtttagatcaggggtgaaaatttttgccgtgtcacatcggatatatggcacacatttaaagtattaaacgtagtctaataacaaaacaaattatagattccacctgtaaactacgagacaaatttattaagtctaattaatccattattagcaaatgtttactgtaacaccaaattatcaaatcatgaagtaattagacttaaaaatccatctcacaatttacacgtaatatgtgtaattagtttttttctatatttaatacttcatgcatgtatcaaacattcgatgcgacattatgaaaaaacttgctagggatccaaacatgccctaaatgtaaatactcgagtataatgtgacagtttgtgctaaccatgcttaaggctgtgttcggcagcctgggttgagaacccatatctcgcgtatggaaaatagagcggtccattagcgcgtgattaattaagtattagctatttttttaaaaacaatataaatttttaaacaacttttgtatataatttttttgaaaaaatagactgtctagtagtttaaaaagcgtgcgcgctgaaaactatactgaggagttggaaaccagggacaacgaacacatccagactgcgttcagtagcaactgatttgaagaaaaactatctcattgttcacacacacgttcccaaacttctaaaccgtaattttaaaaaaatataaaagtttatttaaaaaatcatattaaattatttttaaattaaaatatttaacacttaactaattatacgctaatgacacatctcacgcctcctctcagaaaaatacccttatacagcaaaaggaaaaatcttctttttttctccccttctcctactttccagtgaggagagtgtcagtgcgcgcgccggcggcgaccgagctggcggccatggccatggatccggacgccgcggagtggccgtgcatcatccaggcgctcccggcgttgccgccgtcgccgtcgtccaccggggtcccgaggctgccgaccatggtgcaggcgctcccggccgccacggacccgccgcccgccgccgccaggctcaggcgcggcgccgagccgcccagcccgcgccgcacgcgctccggcggcgcgccggagtggacccccgcggagacgctcgcgctcgtggccgaggtcgcggccgtcgacgacgggtggtcccgctccgtctccgccttccagaagtgggccatcgtcgccgagaacctcgccgcgtcgcgggggagggcggcgcgggggagggggagggggagggcggcgagcgagtgcaggcggcggtgggaggcgctcgccgcggagtacggggtggttcgccgatgggaggtgcggggtgcgggcgggtactggcggatgagcgccgccgccaggaggaaggccggcctccccgccgacttcgacgccgaggtctacggcgccatggaggctctcaccctcgtcgaggaggcgcttctcgccgatgccaccgccggtgctggtggtgctgagattggtgaaaagagcgccgccgccgctgaggtcggagaaggcgacgaagttgaggctggggaagaggatggaaatggagatcgcggcgaggttggagaagaggatgaaggtgaggttggagaagatggtgaggaggaggatggcaatgaaatggtggaggtggaagacgatggcaacgccgacgacaaagacgcgcaaccagatggtggaaatgctgctgcttctgatgatttgggtatgtttcttgtctcctttagcttttcatgttcatctgcctggacattccggtatgctagccatgtgcgccgaatcggatgacgatacattgttgatacttgatggtgaagaagtaaagctctgcggtttatgtcacatattagatggttattttgtttgagtgcagtgcaatcatgtggcattgcaaggatacgatgtgaaagcaattcggagataaggggatatggtgaattggtgatacctaactgaggattagttcatcttcatactctatcagatgatttggccagtggaaattttgccagtgaatatggtttacttctctaaatgtaggatcaggaattaaggtggtttatgggttattgagacaaaaatatctcatgatacagttttatttttttggaggaagagaggttcctctcccatttcattaacgaaatgcagatgacaaagtcttttacaggcactagtctgactagaatgacattcttatttcctcgtgtccagcacgattattgttccttgggcttggttgacagttgagattatatgcatcctcgatggtgatgacccacaatccagattcagtgcacctttggtacattatatgtttcatattaagatataatatagttctagtgtgcaggaaattgttttttaccacgttatgatttatagagctagcaaacactttttgggtagtcaagtcttaattttcatgtgctgggatgttatttcaattcaatgccacgatgggcccattcttaagttttaactgagcatggtttacttttctaaaataaatggtgcaggatttgttaaaatgcagtaagcctatacttggttatattagtttcagcttctgaaatctggaattttgtagttattttcaaaacggttgtggcaaaaggatctatgtgaagccaatttgatatagtatgtgaacaggaactgctatttcatattcaaatcactgaatgatgcaggtatgcagggtcaacatatgagttccagtttaaatagtattagtacatattggtacctttccaaggatggtaaaaagactacataataacgtcttcaccaataaatttggctttggtacaatgtcttccttgtttacgatataatagtgggtattagtttgctctaagacccttttatcttcattgagtgtacaaagcaccatactatgcttagctacatgtgtaattctgtttcatactatcagctagctagttcagtttatttatgtttcctccaagtcacctgacatcttttgatgacaccgtttttgtgttatgtttgtctagaagtctgcgaaacgggagcaaacaacgagggcaagaaaagccaaaccgatgcatgtgaactggccaacaagttacaagagaacgcgcagcacatccatatgctactcaaagaggaggcaggcgaaaatgagaaccataaccttgctatctcatcggattctatggaaaccactcgccaaaaaggtgatgagctgatcaaatcgctaggtgggcttgtgagctacctgaaccaattcactgatctgatcaaggagaatggattcgagaatgtcgtcggtatgagctgatctgtgatgaacaaactctctaggatgcagattccctttgtgagggagggttaaatcagactgccaaaaatctttggcgttcttccttccccgtacttgtaaatatgtgtgcactgtaagatgctttctaatcaaatgctgtaggtttgtggcagacattgctacctgcattggcatcaccatttctcagcgccattgtgtacttcagtgtctggcaatctgctgttctggggcgtttctctgcactgtacagcagaatcccaggtacatttttgcatgtacctctacatctgggctctgcaatattagcatatacacttatgtgcatattgcgagctgcatttgaataagtactccctttgcttcacaatgtaagtcattctttatgaatgtgagaaacgctagaatgacttacattgtgaagcggaggaagtagtttagtaaggctaaattatgtctctccgaggaaacaccgatggcgtggtgatgagccatggatacatgagttcatctaccagggttaatatcctaatgcctatggatatcacacagacatgattacgcttttaatattttgtaggattttagtgagtctagagatttaccattggtcttattctatttaaacaagtgttaagggatgtattcgtgagcgtatgatatgtgagagtgcagtggtgtgtgttacatgtaatccaaagaagaaaatataagactatccattcatagatttgaatggttagtatgtagctccaaaattaatctagccacaccatgctgtgctgagcagagtggctgtgacacaaactattcttagccctcggcgatcgcgcgttttctcccccctccctctccctttctctagccatgcacatgcaaaagcatagccacccactgccttctccccccaccccgcgtcgcgccacggtcaccgtcgccggccaccgccccgccccgccgagccgagccgaagcgccatggcgcggcctcggccgcccggcctcatcgccgtcgctgccgccgccgccctcgtcgcctggtgtctttgcgggcctgcctccgccgccgccgccgccggtggcgaggcgggcggcggcggcgcggggcccgagggcgacgtgctgatcgcgttccgggagacgctgcgggggccggacggcgcgccgccggggccgctgcgagcgtggggcacgccggcggtgccgtgccgcggcaaggcgtcgcagtggttcggcgtgtcgtgccacgggaacggcagcgtgcaggggctgcagctggagcggctgggcttgtcgggcgcggcgcccgacctgggcctgctcgccgcgctcccggggctccgcgtgctcagcctcgccaacaacgccatcgccggcgcgttccccaacgtgtcggcgctcgccatgctcaagatgctctacctctcccgcaaccgcttctccggcgtcgtccccgacggcaccttccacaccatgcgcggcctccgcaagctccacctctcctccaacgagctctccggcccgatccccagctccatcacctcgccgcggctgctcgagctgtcgctcgcgcacaaccagttcaacgggccattgccggacttctcccagccggagctccgctacgtcgacgtctccagcaacaacctctccggccctatccccgaaggcctcagccgcttcaacgccagcatgttctcaggtacgcagatctcgatcgatcacgacgtcttcttcttcctcctccgattcacgccattgatcgattcttgatcttggatttggatttgggtttgatcaggtaacgagtatctctgcggcaagccgctcgacacgccctgcgacaagctcgcctcgccgtcgaacatgtcgacgttcatgaccatcgccgttgtgctcatcgtcgtcggcgtgatcctcgccgcggcggggatcgcgacgggggtcatcggccgcaggaggcggaagcggcggcggcgacgccccgggcccggcgagcccggcggcgaccagacgccctccaacccgaagctccacaccgcgccggccgtgaacatcaaccgtggatccgccaccgccgccgcctccacagccgccgcagctggaacgtcggcctctggcggcggcggcggcgcggcggcgaagcgaggggggagacgggacgagcacgggcggctggtgttcgtccaggagagccggaagcggttcgagatcgaggacctgctgcgtgcgtcggcggaggtgctcggcagcggcaacttcgggtcgtcgtacaaggcgacgctccaggagcgccccgccgtggtggtgaagcggttcaaggacatgaacggcgtcgggcgcgaggacttctccgaacacatgcgccgcctaggccgcctctcccaccccaacctcctccccgtcgtcgcctacctctacaagaaagacgagaagctcctcatcaccgactacatcaccaatggcagcctcgcccatttcctccacggtaaccaaccattcattcctcaatctcgcaacaccatttcgtcttaccgacaacgttcaattccaagaaatatcatcgataagtgcaagttacataaaatactactctctccgtttcaggttacaagacgttttgactttggtcaaaatcaaactattttaagtttgactaagtttatagacaaatatagtataatatttataatattaaattagtgtcatcaaatcaataattgaatatattttcataataaatttgttttgggttaaaaatgctactacttttttctataaacttaatcaaacttaaagcacatcttgtaacctgaaatggagagtatcgtacatgcgactttgttccagaaaaatcatcgttgtaagggttttgttcatcccgcaccgttgaatgcaccgtttatcataactagtgataatagtatttctggaacaaaatagcttgtacgatcgatagcatttcttataattgaacgcttgtcttggatttttttctcttttttggcataatgaattgaggtgagatttttgtaacagggaatcggggatcggagttggattgggggaagaggctgaggataatcagggggacggcgagggggttggggcacctgtacgacgagctgccgatgctgacggtgccgcacggccacctcaagtcgtcgaacgtgctgctcgacggcgacatggaggcggtgctgtcggactacgcgctggtgccggtggtcacggcgagcgcggcggcgcaggtgatggtggcgtacaaggcgccggagtgcgtcgcggcggcggcggccggcaagccgtcgaagaagagcgacgtgtggagcctcgggatcctcatcctcgaggtgctcaccggcaagttcccggcgaactacctccgccaggggcggcaggacaacgccgacctcgccggctgggtcagctccgtcgtcagcgaggagcgcaccggcgaggtgttcgacaaggacatggccgccgccggcgccggcgccgaggacgacatgctcaagctgctccacgtcggcctcggctgctgcgacgccgacgtcgaccagaggtgggagctcaagacggcgatcgcgcgcatcgaggagatcagggttccggaccccacccccacccccgccgccgccgctgacgccgccgagccctcgccgtcgacgacgacgacgacgaactccggcgagacccggtcgtaacgtaacccgatacacacgcgtatacgaaatcaagcagctccaatgatcgcctcttggtcaacggtcagcgccttgcatgcgtgccacgtggcatggtacggtgagctattgcatgggcgaaactgattggtggttaatgagctaagcatgaagattataatttaacccagctgatgcatgcatggaaaattcgagcgtgtgtagaattgattttggcagaaattggtttagcttaatttaatgaagggatatatatggctagctaagttagtaattttttattttgctgtactgattagagtgtaagagttaggaaattaagatgttgggatattttttcttttcctttttttcttcttttcatatatacatacaaatttgttgttacactggaatttgttgctagctcgtagtttaagctccttgctagcttgtagtttaagctccttgtataaactttcgaagtataaaattctcagatttttgccatagattcgtgtgaagatttgcctcttgtacttcaccttttccgatattgattttgctatttcacttatatgatagaattttagattcatgtctttcgatttttcattgtaagatcttgcatcaagattattgtagattcaatttgtagttacattcaaatagagagcatttatacttggttatagaatacttacactcagttacagaacatttacattatgttacaatcaccaaaattaaattttgcaacagtttgtctctagattttgtccttttttattttactcaaaagggactatatccattgattaaaaaatatataaaatttgaagcttcaaatctggcatggttccttccaatattcttcgaagacaccttttccaatccagttcgtctctaacgagtagcttgggtagtaagtggttgagatgggccgagatgaggtccacaacatgacgacctcattgaacatgggcctcacattatgtgggccgaggaagcccataaacgggaatgcaagctgcgtgcaaaaaaaaaaataaaaaaaaggaaaatattaaagaaattgcttctctctcgcgcatgcgccctgggcgttggccggccggccgccggcgaggtgtcgtcggcgccgggcccgccggccgccgcgctagccggagacactactagtagtcagtagcccgccgccgctgtattccctactggcgtgtcgtcgtctgagtcccaattcccaacagcaacggctgcacgcacccaaggtgttcgagggattgccacgccggtggccggcccaagtctccgggaaatctccgtccttctccggggggcctcgccggtaagccgcggcatagcagcggaaagctcgatcgaatggcccaggcgctgcagatactgtgctgggttcagaggcagcatacgctcgccatggctgctcattggctgtccggaccttgaagccatagaaagatctgcttgctgtaggctgcacaaggtggcgcggatgaatgtatgcatgatcgcctcttcatccaatctgagcatcaggtatggatttcaaattatccaccggacttgggtgcaggattttgcgttttgtgttttcctcgcttcttgggtttctccgatatctgatggagaatatcaggcagctgctgatataaaagactcaggtagtgagtactcagtttgagcggaacctcactttcaacctgatataaaaaagacagtcaaaattttggcagtagctagacaaaacatttttttttagaggcagatcaacattactattgacccggcttttgggagaaagccaaatgtgaaatcaggaaccagacagaacatatagttttgagttccgtaaatattattgtcaatatatatatatatatatactccctccgtttctaaatatttgacgccgttgatttttttaaatatgtttggccgttcgtcttattcaaaaaatttaagtaattattattttctatcatttgattcattgttaaatatacttatatgtatacatatagttttacgtatttcacaaaagttttgaataagacgaacggtcaaacatgtgctaaaaagtcaacggtgtcaaatatttagaaacggaaggagtatatgattttggactctcagaagaataaattcctaacgaacttttgttggcacaagaattcaaaatagatagtgctaataggctaatagcctagtccgcgtagtaagataacatttcagtggaaaaggtcccaaaaaaatccttttgaactttctaagcagatttaacatggtactattgcactatacctgtatcatccacagatttagccactgttagttggttggtgctccactgaacttcagtgactgaaccactggtgcactgtacagtgtacaccacacagtagtgtctctgcagttacagtgcagctgcaaccaggtttagccaacaaaagaagtactcccttcgttctaaaatatagcaatatagtatagaattggatatacctagcactttctaaaatatagcaatatagtatagaattggatataccctagcactatgattcatggatggaggagtggtattcagatggaataagttgtctcaagaaagttttatctgtttgtttgggagagcaaattagtacatttttatgtcgcatcagaaagattgtggcgaacaaatgcaaaatcgtcaggagctgtcacttttatgataatgcactactgtgctgcacaatccatgcatataagagacagattattcgcctgaatttaatagcatctgtcgtttcattttgaaagggtaggcacacctgcagattgggctgtgatgccaggcttgccagctatatagctcactaaagagagaattgtgatcaagcctagccagctattagggagttagttaagtataattgcatcaggagagacgcgtacgcttaagattatgatatattgagctttcagggttatcatatcatgtgcaggcttaattgtggacggacatatcattcacagacaaatcgggatcactcatgtattaggtttaattagggtgcatcacctgcagacaaggactgcataatgctagaatttcggacgtaaaaagtatttaatggaaaaaagatttatacgtagtcaaattacaactcttcccatgtagagagcacactagtgaaaggtgagaggtgaaaataagttttaaataaatttctgcctcaattagtttatgagtagctaggctagcttataatgaaatatctttttattcctgcttgctatcgctttattaccactagtatattatgatgaaatatattttttattcctgcttgctacttctttattaccactagtataaggtgataagaataatttgaatgtgcttattggctcaacgagtgacattgatttgtctcctctttatggcctgatcgcatcgtcttagcatcgtagcaaggggagaagtagtggcattgatcattaaagtgatggtaaaatatatttgtttctttctggaatcatttgctttgcacatttgataagttgccaatttgatgaagcatatcatttatagatttaacatgccggtcagtaacttgtaatgtttctgttccatttaaacgcatcatgtgtgcatatatatttatagaaattctccagcttgcttaattatgtcagaatacgttatatttacaaccaattattgaccatgttggtttgcgcatcttagttatacagaggtgaagtgttctcaataaacgcatcatgtgtgcatatatacttatagaaattctccagcttgcttaattatgtcagaatacgttatatttgcaaccaattattgaccatgttggtttgcgcatcttagttatacagaggtgaagtgttctcaatatgattctatcacctttatgtaatcgtctaagatcaataaaaactttctttatcttgaaaaaaaatatttcaccatgggagcaaattaagtacaaaagtatatagcaatttcaaatttcaggtctcaaagaacgctatcctagagtttgtatgctaggtgaaccccacaaaaacaggggaatattgtaggtgatggacagttggtggtctccggcccttacattgtcgagttcatgagacctaacataacaaaggcagatggtcacgaagaatcaatacctgtggaaatgcaatgtatgtttatacgaaacttgttaaaacttttctgtgatgttgtataccatcgatctttattctgttcctgtcttagctttgctggagcgtggtacaaggcgcatgttggttcactcttttgctgctgaatcctgaatgcacgtgtactgcataacaaaccaacaaaatggaaatgtttataactcaattgatgttatactgtattaattttcagccttggctgactaccacatattgatcatgttctcatgtataatatggaatttgtaaaacctgattctatagaattttaatttcttacacagttatagctacatatcttatttcaaaagatttgccctatgctatgcaattcttgtacttactgttaatacgatctacactgccatagcccataatatggatgtatcacaatcaacagttgctgtaatacaatagtacttgttttctcctgattaacattacaagtaatttttaagtccttcagatcctagcacagatgtctcttttggtacctgattagggttggtgattgtgcttattaaatcaattactctggccatgatttctgtcgagctatggtcgttggttgtctacatataggcaaacacatgtcgcattttcagatcaacctcacgtaccatatggctgatggtcaccagtgaaaggaagcatttaaatgtggtttaacagtgacccatgtatgtactactcccaccatcctaaaatgtttgacgccgttgacttttttaaaaatgtttgaccgttcgtcttattcaaaacaattaagtaattattaattcttttcatatcatttgatttattattaaatatgctattatgtatacatatagttttacacatttcataaaagtttttgaataagacgaacggtcaaacatgtttagaaaagtcaacagcgtcaaatatttggggaaggagggagtatatcacaggtcagttttctcaaccattggttttcaggtatattgggaacgcatgatgcgtgtcttggatggatttattgtgcttgccgcccatgagaaaagaggaagatattgacagatgagttgtgctaaaagtacgaaaaaaaaagggtggcacattttatatcaccaagcaatataatttcttaattaggctcactaatatgtctagttaagtatgacagaattaaattgacatgagcactaaacaattttaccatacttgatttataaatatatgagcactcgcatttatcgaatactaccttaattgtcagagtttgtttggaacacatgaatttcctgtagagaataattcaagacctgcatagatctgtcaaaaaaaatcttaaggttctaatcagtgcctttaattaaactgtttaattggagcatgtataatactgtttaattggcacatacatgatgattacaactttgaagcgttgggttccggttgtaatatatacagcgttaggatttaccttttctttctgcttgatgacaacacttgcaagtgacatgcaaatgtgcaataaactttcctctattcttttcatgacgatcgtgacacagaaacagagagagccgtccacattggatcgatcacaccaagatatgttttcctaatttgccctagtgcttttagaaagttcacgagccattttgtcaaaagaaagaaatattcaggtaaaataaaaaacgaaatgctttaatagaaagagaaaaactggctttaataatcatgttgcaaactaactcttttcttgttgcttcatcgcttaaaatttcgcaaattaagggtgtgtacgtgtgtgcatctgatgatctgaataacaaacaaacaagtttatgcaggtaaccgtatgcatgagcaatatccatcgtatcatcccaagagaagcaagcaaagatagcagagctaaaaattccatgaacatgcaacaaaacaaaatttcagcgaaactgccgaaaagcaagtttgtatgtttattatatataggtgtacacggacaatctaccataacaaacatccaaatgctcaacagacaaagctacagtactccttccttgtacatcaatcacatttgatcaccaacactcaactactacaaatcatataaattagttttttttaaaaaaaatcataaaataaaactatacattacaaagttttggtggagaccgctggattatactcttacggtcttacctcataaagagacaacgatcaaccgatcatatctaatctatgcaaaatttaagaattttcggatgcacttaaagaaggacaagtccttgattctcataagataaataatcgatattgtggaatattctccactaaatatcaagaaataaaaacctccacagaaagagctcccacatgtgcaacaccactaaataatttaatccctaacaaacccaaattcccagctcccactcacccatttgctcctttaaaatgttgccaccaccttctccttccctcctctctctctctctctcttctctcttctctctctccataaacctcaccattggtgttcttttaatcggtgagaaagcaagtgctccaagaattgcaaaggggagaggagagatgagagagtgaagaacaactacataactaaagcatctctctctctctcctctctctctctctagaacacaagaacaatttagcgattactagctagtgttcatcaaaactgaacttggacaagaaatttacctaaagttagtattccacgatgagctttcttgagcaggcaaccgagcggaaggcaccaccgccggcgaggctcggctccatcaccaagctgacggcggcatcgtcgtccttcgccaacctcttctccaccttcctcgggccagtgagctcccccgagccgaggccgaggcgcagcttcgacggcggcgccaccggcgtcgggcttggcatcgtcgcggccatgagccacgcctgcctgacgaccgaggccgagccgatcgccatcggcgcggcggctcggcgccgcgcgagagaggaggccgagctctctgagagctacacttgcgtcatcacgcacgtcgccggcgtcgatggcgccagcggcagcgtgaggaagcgggtgtactttgggttcggcgacggtggcggcggctggcttgtggaagccgacgaggagccggcgccggcggctgacttcttgagccggtgcttcctgtgtgacaagaggcttgatgggctcgacatctacatgtacaggtaaataaaatttcatgcatcataaaaaatatcaaaattttgatgaaaatagtactatattgttttgacaatattatacttattggcacccaaggtctactttatggactattctatatattgcttaaaattttcaggagcttaaacattcattttggaattctaattatatttttgtatttattggtaacgtgaacctgccattaactgcgaagcacacagcaccttagtataggtgggaaaaaaattcaaaaatagttataagaagttcattatctttccagaaagcaattggaaatgccaaatatcatacatgatacattttaccttctaagttttacctagtatttttttttatttctagctttttggttgaagaggatgttacggttttgtcttcctaaaagattaatagagtatgtagtttgtagctttttaattatagtgaagttgctttgtttatggaagacagctaacctgcaatacatgtaaaaagtatatagtatataagtctctagtcaatcagaaataactagtggacatacaccagatcaatatacaatgttatataacatggatccatcataaccgtgcttatgttttcttctttttcctgtgattagcatgataatctctagcctaaagagtgaaagtgaagacttttccctgttgcttcaataaataacagatcatattttattctcccttttaactcaattcaaaacatattcaatgtagaatgggatcatcactaaaacaacaagttcaccaatcacatttttagatgtcacacattgctttgcaatattactagtactcgttaaacattggaattgtcaaaagtgagaaaaagtagagcaaccacttacgtcattgtgcatgtctcaaacctgtaggggggagaaagccttctgcagctccgagtgcaggtgccaccagatgctaatggacgaccatgcagacaactgtggatctgaagccctcaaggccaacgactactcggcctcgccgcactctgcgccattgcccttctccctcagcgtcgcagctgcctagtcgatcgaataatcgactgcatgatgtagcaccgtcaggctgctcttcaattctgtagcagcaaagaaatatatagagagaggtcaaagagatcatttaattaagcggatgaaacatataaagagtaatcactagaatgcttcttaactgtggcttgaataaaaaaaaatggagaggattctcacactaaagaaacagattaaacagatgaagaaagttttgagattatatgctcaccgcaagacactggaaacttcgtgcttgcaatattatgtacgagcagaagtaattagtaaaggaatttgatgttatgttctcttctgaaatttcagtaagagagagtgtattacatatcaggtgcataattggctcaggtaaaagttttatggtctagacgacagatttgttctaatgaataaccgaatttcagtatttcaacttccagttctaattaagcactggtaaataacaccagaatctgatttctagaggcaaattttgagttgcagatgagatccatctaagttacagattgtcacaaaaaaacattgcctcatctatcccaaccacaatttgcctctagaaaattgtcattcttgcatctatgtggaccatatggtccatgcatgtgcaggcacattattttcatatctcgtagagtgtactaggtgcctaggtaagatcaacttgcaactttgaccattcttgctcacgtacactatggcagtatcacagatgttgatgcatcaggaaaacaccaggtcataaaacctgaatcttagtgacatcacttgggagttgggaccatccattacacagcagtattggtatgagcatgcaagaaagcttaccatttatcaaacaaacaagataataagtctgcagttgttcttactaatgtattgccctattttgctactccctccgtccaattttatagaacgtttttttttaatttggtgtagtcttcaaattaaactttaaccattaatttctcttacaatatattttcaatggccacaaaaccaatatcgtgtaaaaacactctcaaatacgaatttattaatataaattttatagactaaacaggaataaaatttgactaattgttggccaaaacttgaagactttggggttcttttttcaactacgcccaatgcttatacaaactgaagaggggtagaattttttgtacttcttttgacagaaataacagtttttaatccctggttgtaagtcatcaggtgtacacaaaaaggtagcaacagtgcggtactaaaaatgtccgggaggcacgtgccaatgtaggctgctttcatactgacctggcacagaatttgctcccaggaatagtttcttggtggaatacgagaagcttggatgtgatcttgccatctgtggaattagattctatggccattcactccatatcaagaccacgttgagcaccatttgattcactcgatcagcagcaaacagtagcctggaatggaccgaagaggagagtctggcacaatctgccttctctgcatcttgagcatcacaattcacatcagagaggaaattatctaaagacgtacttgtggtcatcatcaattctgaaggcaatagaattatcaggcagactagcaaatgcttcaacaacagcttgtatggttaccacctatacatgaaaacgagaacatgatatgttaatcttcttagtcacacactgtaaaataaaggaaatgagctaccaggacgcattaactcgcctctcaggtgggcatagtataggaaacaagctattttatctttcacatttctgtgatgctgatacaataagggggcagcaaggaacatctacacctgttcctgtctaccattgttcttcagttgcaaggaacatcagttgtcacccagtagcaatagctacctgtctaaaatttgaaggcgtacaaaactaaaacactaataaaggaagatgagcctcttaataggaacaatgcattcaaacaattcaagttcactaatacaccgagtctttctagctactcatccatgaacaaaccttgatgatacagaatgatggtttgaatattttacttttttgcatgcacatccccctaacagtaactttgttcagaaaatattcattgtcgagctaagaaacagatttacaacacaaatattttgtggaataattcactgtattttgaacaacaggcctatcaacaatatcgtagcatcaggattgatgagtccatcagcagtgcatatccaaaatgtaaatgctaccctgcaaataatgaagataagagttttgcgggaagttgttatatccactcatcacagaatggaaaacgaaatgatatgcaaatctactggtcatatttaacctagtctccatagagactatatgccaatatagagcatctgtgtaaagcatttgaaagaatttgttctgtatccattcaacagatgaagcttaaagacttaaatctattccatcagtcttcttgcccccaaaaggtctgatttggtcgtattggatgctttgtcctttgttctaagaaaagtaaagaaattctagtgtgccaacatgtggactgcacatgattgccatatgaaatgaaaacacgtaaggaaacataacatcagccacataaagtacagtacttgaaaagatcgtgtacatctaaaagaaaataagaaggaattaggtaaataggaaaatccaaagattatttcattgtgtttactctaaaatgcggtaagcaattacatatttgacaaaatataggctctgatatttaagcaacccctaaaaaatgttaattcatggacaaaaacaaggtttactaaaaataaataatgaggtgtctaagaacatatgccatgtttcatactgagtaaattttcaacaattactgtacttgtgatggcagaacccatacaggtgaatccttcatagattatgtgatgtagtatataatactaaaatagattcaaaattaccaggacaaaactactgagaatagtttatccctaagaatttcagctctgaagtctaagaccaggatgatgtccaggattcagttctaacaatgtattgtaaccagatcagatcaagacttgggtccagcttaaagatggacaccaaggaagggcttggtgtcaatggttttaagaaagaagcaacaatatatttcataccagcatatcaaacaaggtgaaatggtgagcgtgcttgaggagactcgtaccccgggctgatgaggtgcatgccagccatcccagccactgtctatgggcgcatctctggtctgaaagccagtccaaaagtatcccaaagggtcgccagctctggtctgatctggcagtccaagtgtcctattgaatcaggtacagcctaggctagaaatccatgcaagattgagcttaacgttgctgagcctaagttagcatagataggtctagtagagttcccaaaatatagtactccctccgttcccaaatacttgtcagcggacaccattcatatttaaactttgatcacttgtattttggaaaaaaaaattataaatactcaaaaagatgttgtgttatcaaattgtgttgcatcctaaacataaacattagctttcattcattataacctaaccagtcaatggtaacaaatagtacttgggaacagaggggtggtgaaggttctaatgcactcgggtaagctgttgagaatactacttccagcaaaaaggtgctagcaaaaatagtggtattagatttggtgggcacaaactctacagctaaccctgacctaactctcaatcaatcttttaaaacttttggcacagacataagttcttctcaatatgttttacaagggtttttttcaccctcttatgccaggggttgggctttggatcaagagctcaccctcatgcacaacatctctctgaacctatccaagtattcccagctgaatctttttcatcttctaaaagggccaaaaaaatggtgtttataaaacacaaaataagatgatatgatcgtctaaaggatggcaatgatcatatgttcacaatctttaaagataggatgcagaaagctcaatattcttctgttggactaataatagaaagacaccatcgtcttttctcaagaggtgcctcaagaatctagttcaaaggttctcgtagagtagatctagaccataaccacttcagccagtaatttaagcaagccaactggtatttgcaccgctcttgtagaacagcataagataagaaggaccatacaagtcttattaggcatttaatctggaatggtccattggccaaacactaaccaactagattaatagcaatcatagaatagctcaaatatgttcagtagatcttgtctttaacttcttcaatacaccaagcttattgggctaattttgtgttccagaacaaaatgtcagactttaccttcaagaaaaagggaaagaaaacactgtttgtagggagacaaatattagcatattatttagtaaccaaagacgtgattctagtagtttctaatactacttccgtcctttaatatatgacattgattatttcaaaattgaactaaccaacgtcatacataaaagaacagagggagtatcaattaggatagcaaaaataggctttcaaacccatatttcataagagtaaccgcttgcaactgtatatgcatagttacagatattaagatggaataaattactctgagtaaaatggaacaggtaaacctcttctcgcatatagcattgtatctctctaaaacagacttgcagtacattatgagtttatgaccaaatcatctcaccgattcaattttgtaaaatttaatgctctaattggatctaacgccaataaaacttatgcaaaaaatatttcatgtattgactgttcagttctagaattcccctatttccctcctatcaaaaacaagtcaatttttttcaattcaaagtcaacaaatgccgctttgaccactgaaattgtttacttgaaaagagattttaaaatgtagtttgattgaaatttttactcatatcttttcatttcatgcttcgaaaccatatattcaagacaatatattaaagtagaggcttaacaacaataatgcccacatcctgaaatggcatgaggtgcaatattcaaggtacaattttagggtagtcaagcaaaagtacatcactagtgatcagttgctgagaacatattagctttctaactgaattcgaactcttgaaagcagtgcatgtccaacatgctgaaactcacagatcaaagaaagcataagtgtgcgtgcgttgtgagtgtcagcattgtactgtgtaattctcaaaaaaaaaagcatatatttcatcagaaggcagcctaatgaaaagcacatactgaaatatcattgcattcggggtgctaattctttgttctgcatttttcactaacctgtataatcttttcagaacagactgttatttgccacaatcgcagtagagaataaatccttcagcacttcatttacattcacataagctatatggaatccaaagcactctttgattcttctgtcattgttgtccagtaagttcaccactaactctttgatgctgattgcttttgttctacagcagagattatatgtacgaacatcacaagtataagttggagaggagaatatttttttccctatataaatggacaaacatcagtacattgatgcaaataaggaagcacccaatacatgctgtttagctccacacaaatagttagaaaatgaatcattgtcttgtagtatcccacaaaaaactccaaactttccgcacatttgcagctagcaagttctcttcttttaccaaatctgcacagaagtctataaaatactccttccagttcatctaccaaaacaatccactctttgtccatgtagcttactttgccctgatctcctttgctggatatggatctctaaaggtcctcaagccacgagacaagtcaaatactctgaaagacttggacgtgctatttacttccgtatctgcatcaactgtttcaagcatggctactgttgaaatggaggatttctcaagcgctcaactctgggttttgactattttaatgctgattggtggtgaggtattcacttcaatgcttggcattcactttatgagagccgaatttggtacaaaagagtcagtcagcacaagggatcactcaccttgcattgatattgagtctattacttccacaaaatttggtcccagcacccagggcacaaaagttacagtttcattttctgaactccgcatggaaaatggaggacatgtagagcccaagacgattaaatttttaggttttgtagtgatgggatatcttctaataacaaacttaggcggctccctacttatttacctctaccttaacctggtaccaagtgcacataaaattctaaagagaaaaggcattgggatcatcgtattctcagtatttacagccatctcctcagttggaaattgtggcttcactccagtaaatgagaatatgattatctttcagaagaactccattcttctattgctaattcttcctcagatactagcaggaaatacattatttgcaccatgcttgagattaatggtgtggtcacttgagaagattaccggaaaaaaggattgtcgttacattcttgaatatccaaaggccattggatataaacatcttatgagtaccagggaaagtgtttatttgactttaacagttgtgagcttgatcattctgcaaaccgtattgttcctctctttggagtggagctcggtagctttggatggaatgagcaactatcaaaagatagtatccgctctatttcagtcggtcaatgctaggcatgcaggtgaatctgttacagatctgtcaaacctctcttcagcaatcctagtcctatacaccatcatgatgtaagtcccttctcaaaccttctccccaaaataagaatgatcataagtaagaaaacttcctgtatttattgctctagtcagtaaactatataatttaactaccttatcatggacatcacatttgccttccttcacttataatagccctatagtggttctctcgaatatgtgcagcaacgttcaaatatattgtacttcactaataggtaggttgcatatagtagaatggaacataaggacatcagataatctttaagaatacacaggaaagcttcctaccatagtactcctacctattaagaaaggaattttttaatcacacaatcccacaagccagactcagtgctagatttggttgaggactatagtagttcaagaaccacttacaggctcaacagtatattacatacaaagcagttagtccagtatatgttatcattgagaggaattgttcttaatatgtaatcttaacacatactttgactaatttttatgtaggtatctccctggttacacttcgtttttacccagacatgatggtgaggattctaagaccgagaagataaacaaaagaaaagggctattggagaactggatcttctcacatatgtcttatttggctatctttgtaatgctaatttgcatcacagaacgggactcgatggctacagatccacttaatttcaatgttttcagcatattgtttgaagtcgtcaggcaagccactgaaattcactgcattctgcagaaagctcatgattattttttaacatgagtatcatcactgaacatctggctctgattgttgcagtgcatatggaaatgtggggttctcggttggctacagctgcaagaggctactgaaccatgatgcacgctgcaaggatgcctcgtacgggtttgcggggaaatggagcgacaatgggaaagcgatcctgatcatcgtcatgcttttcgggaggcttaaaacgtttaacatgaagggtggaagagcctggaagcttagataacatctaaccaatttcagaataaaagtagctaaataatgctgaacagcttcaggtgtacacaacaatgtgctagcgacagattcgagcttagcttagaataacaagggtgattaggtgaaagatgctcgtcagcattatgtggcctttcattcaccaagaagccatgcatcttccacctgtgctaaaatgaactacaaaaaaaaaattgtattccagtttctttttgtgatagcctccatagttctctacaccaattccaacttccaattcatccagcaaaatattgggggttttttttttcgaacaacagcttcacgcattcagagaagaggagagaattcgaaacgactcgcacaaatccccaacatgactggatgcaacgaatcgaacgccaaatgcacatggacctagcttttcagatctgaagcaacggctaaggatgcagcagagcaatcgagtaggggaatgcattagtgaaggaggatgggttcacggagcgtacatacatctcgtcgggcggcgaagggaagctctcgcatggcggcggcggcgcgagccggcgacctcgatagcgagcgggcggtcgccgacgacggcgatgatggttcaggcagcctactgctagtgctacggttgggcacggcccaatcaatagggcccaattggcccggtttactttagccctcattaggatagtgagtcttttactgtgggttttggaattaatccttcctacacgtaaaacgagacatggattaatgtgtgattaattaagtacttcctccgtaaaaaaaactaacctaattggtgatttgacaccacctaaaacaatgaatctggacatggacatatggttgtccaagttcgtagtcctaggtaatgttaaaccctcatttaggttgcttttttttacggatagagtatgagttaaaaaacttaaaaataaattaatataatttttaaaatatagtatttttaatataaactttctagaaaacacattgtttagccgtttaaaaacatgtgccatcgcccaccaccttatttgattgcaatactgtagttttccactcgttgatggaggttctatctttgtagatgccatacgggcagtggggaacttgacgggtgcccccgcttcccgtacccgcatggggaggatgatggggaaatttgtcctttatttttaacataaactgttgttttgctctctcttattagggtttgtatttttgcctttattttttaaaaggaatcagtcgtttgcctccacctttgatgtctggttatatgggccccatggattttagttaaatctatatatatatatatatatatatagctaattaaaaaatacgtaaggtttccgggtgttttttttcgtacgtcattaccacgcgctacgctaaatccggatttaatccggttaacagcccgatcgggctttttttatctactccacaaccacgtttgatacggtatatatattttccatgtattcacttctcacatgtagtagtctgcccacttggtgagggatgaaagttttcatttcggccaccctggttcgactccactttcctctcatttttacacctattatccctttaaaataagtctactttgcctccctcatgtcaaattatatttgacttcgattttttttctctttttccaacagattttaatttattatgaaatcttatcttataatgaatcagtttttaattcgaaaattaaaaataattaaattatgtacacaaaaatcaatataaatatacgtttacctaggccctagaataagtctactttccctccctctgtcaaatcatatttgcgcgtaattttttttctctcaaccaatagcacggaccatgcacatccgatgaataaaaaatcaaaagttctgcacctctttcttcaacagacttttagtgattctgaaatcttataattatattatataaaaaaaatcagtataaacacgtgaaccaaccgatattttttaaaaacatgaaaattgaatatgtgcatggtgtgaaacttcacaccatggctccgttccttctatctcggtttttgttagcgcgtttttaaaactttctatatacaattgatataaaatactagatattttttcttaatttttgtaataataaaactcaattaatcatgcactaagaggttttctacaaaagaaaaaggaacggcatggtacggctggcgctgttcaggttttgccggttagagcatagcagtgtactgttgcattgtgattataaatcaatgcaatgttatagcaattatcaattatgaaaaaagaatataaaagtgtcataaaaaatgtagtttaaaataattaatgaactcccaaaaaattcattttgtacttatacgtaaaggtgcgttgctcagacgtccatttctccaatgctacaatcatcgggaccatgtgttagggacatcattcacatcctacacgcgtagagcggattaattgtccaagcacaaatatgcatttgtgataactatgaaggtgcttcgataaatcattgaggttaaatttcattcacctaaccattacccagtgcaatgatatcacagtttgtcacacaagggttgagagagagtgtgtgtttttttatccatcctgattatcattagcctaataaataatttatctatcatgaaacattactatatacatgttaactctagactttatagcatctaactgttcctttgcccgtaacaaagcatgtgtatttttctagcataacagtaacatgattaaaatatccttcacccgttgcaacgctcgggcatttttaaaatactccctccattttaaaatgtttgacaccgttgactttttagtacgtgtttgaccattcgtcttattcaaaaaatttaagtaattatttatccttttcatatcatttgatttattgttaaatatactttcatgtacacgaatggtcaaacatgtgctaaaaagttaacggtgtcaaacattttgaaacggagggagtatgagaaaatgatttatgaaatattgattcattgttatccctgagtaaatggatagagttccaagcaccatcgaatctcgtacttgtagtccgtcaccacccaaaaaccttagaggaggcagcggccaggcgcgtggaggcctgcgacaatcgtgaggcttcctacgcctagtgcggtgagcggcggtaaggcacgccatggtaggtggtgactgtggggcttgttgcggtgagcggcgggtgaaagggtcatgggattgcttctatgcgatctagggaaagggcaaagttgcacgggttgaaaaatatagggtcaaaatacaacaacaatcgagaatataaatgttctttcgcgctagagttaacaccgtcaaacctaccgtcacccgtgagggcaaacaactaaggggtatttagataccggggtataaagttttggcgtgtcacatcgagtattatatagagtctcgcatagggtgttcggacactaataaaaaaactaattacaaaattaatcagtaaaccacaagacgaatttattaagtataattaatccgtcattagcaaatatttactatagcaccatattgtcaaatcatggagcaattagacttaaaaaatttgtttcgcgaattagtcgcaatctatacaattagttattttttaagcatatatttaatactttatgcgtgtgttaaacattcgatgtcacatgataaaaaaatttgagtgatctaaacagggcctaattcatttttcaaaaaaaacaaggacaaaatgcaaaccctaaaacgcgaaagaaaacaatagttcggggttaaaagtgaccaaaaatttgcacccgagtgctgtgtgactgaggacatatcacatgtgaggtgcaaaaacgtgtggccacagaagatcacgggcagctgacgtggtgcgccgtcacgttgccgccggtggtcggtggtgcggatccgagtcggctcccatcactgggccggcgccgccattttcccaaactacccccgacgccgcaacgcatttcgcggcggcttccaaagcagtatcgtaaatacgtaggggaatgaggggcaaaagggagctgctttccttcctcgcagcgatcaacacaaaaagcttctctttcccttctcctcctcggtgatctgtctcgccggggcatctcgaaaagcatccgactccgacgccgccgcgcgccaccacccggccgatcgccgacgccgcagccgctggaagcagcagggacgacggagaatcggagatggacatcgaggcgttcatccacggcggaagcgggggcggcgacgccgacgccgaccacccgctcggcatcttctccgccgccgacctctccggcttcggcttcgcggactcggtgagtgattgattactgattattatgctgcctgctgcgactacgtagtatagtagtagtagtagggtgtgttttcacgccaaaattgaaagtttggttgaaattaaaacgatgtgacggaaaaattagaagtttgtgtgtgtaggaaagttttgatacgatggaaaagttgaaagtttgaagataaaatttggatctaaactgggccgtagtattaaattcgtgtgctaaaattaagttgaacacttgctgtattggatagcttgcagtagcacgtacggtgcttgtatatgcgtttttttagaaacgtgcttgtatatgcttgactagagtttcatgtctgcgaaattttcgttaattgctgctgatcagctgactcctactacctttctcaagtagaagactgttggttcatcctctaccatttttttacttgtacagtaatttttcatagttggtacgcaagtactccctccgacctccaatccaatatactcatatacttacgtgcaacttaatgcgacatatcctaatactatgaatatggatagacagtaataaatttactcttactaggagttttttttccccgattatatggaagacacacatcacaacacaagcacaccaaacttgcacaattttagttcgcgaacgaatgatgtcttgtgttttaaaagaatttatttgaatagcccgataagaggaaatcatgaattctaaagcatggaagaggagaaaccattttaggttaacagcataacatgagagtttccgttgtcatgacagggtttgattaagttggtattaaggactggtgataagtaattcttttcatataaggaagatgattacaagccctggttgcttatcttaaatcgtacttgattcttgatttgcatgattgatcactcgattaattttacttatatttttgtccaagcagagcaccatcacagggggcattcccaatcacatatggccccagtcccagaacctgaacgcacggcatcctgcggtctccacgacaattgagtcgcagtcatcaatctgtggtacggcctcacactcgtcatcttccacgattttcatcaattattcataagactgcaacaatttgcacacaaaaatacttgttgttcgatgtactcaatgatttgctactgtattgcacactgaaaagcacatgcaacttggatttttcaactcatggagatttcagcgatggacatccatggacagtaccagtgctgttactgtgtcatgtactgcatcaaaattgtgtttattgatgaggcacaaacaatgttcagtttatttaattgttcttgctcactctctgttcaattttctgtaatcagcagcagcaagtcccacatcagctaccaatctgaacatgaaggagagccaaactctgggaggcacaagtggttcggattctgaaagtgaatcgctgttggatatagagggtggtccatgcgaacaaagcacgaacccgttggacgtgaagagagtgagaaggtattccaagaacataagcgactatgtcaagcattttgtctgtcactgcgtgaaaaattatgggcatattcgctagtagtagaagttgaacattgcttttcagaaggaatgtttgacaaagaacttgcatgaaacggttgggggcttcaaattacaggatggtgtccaatcgggagtctgctcggcgatcgaggaagagaaagcaagctcacttagctgatctcgagtcacaggtaaactgatatgatctgaagttttgtacctgccgaacatttgccattgttcaattcaaacagtaacagattgattcgactaacaaatcatgtgccaattggtagctgtaattctgagtcaaaatgcgaaatgctagtgccggttctttcagatttccatagctcaaatcatgctcttgtttgtcaggttgaccagctccggggcgaaaacgcatcgcttttcaagcagttgacggatgccaaccagcaattcacaacttctgtcacggacaacagaatcctcaaatcagacgttgaggccctccgggtcaaggtgatcattcatctccatcttcatctgcacattgcattgctcatcactgtagccatcgtcaaatccgtcctgcattttcggccggtttctgagctctgaattcgtccccgtttgtaagtgcaggtgaagatggcggaggacatggtggcgcggggggcgctgtcgtgcgggctcggccacctgggcgggctgtcgccggcgctgaacccccggcaggcgtgccgcgtccccgacgtgctcgccggcctggactacgccggcgacgaccccttcacggccgggctgtcccagccggagcagttgcagatgcccggcggcgaggtggttgacgcctggggctgggacaaccaccccaacggcggcatgtccaagtgaaactactggtcctacttctatgtcagctcagctacgtttgaaacgtgatgtgtccaagtgaacggacttgagtttttcagagtcctcgtgtcgaagtgtcatgcactcttccctattcctgtaatagaactgactagctaagagactgaaagtctgaaactacgaagtataaatgtggtggaatttggaactatttttttctgatctggttgagcttgccttctgaattcatgatccatcattggtgagagcctggagaattcaggtaagtgaccaaatggtcgaaaaaatttcatctggtagggatatggtaaatcagatttactctgaaagtgaatgcttcgtttctgaacaattcatggtgataaataattgagtgcgatttctatgcttcaaaggactctaataatgatctgtgaatggttaaggacgatttaatttacaattacaatggtttggttcagttttgattttgctcttcgtcccttcccgccatctccctcgcgcgctccctctcttccatctccaccaccagctcgccgtacgcggcggaggccaagccgccggcctccgccgtggccgccagcgccgccgcgaggccgacgcagatcctcttcttcccctcctcctcgttccactcctcctcgccgccgcgccgccgcgcggccgtggcgacggcggccgcctcggcggcgagggcatccacggccctggtggccgcctcgacgtcgacggcctcgaccgcggcggcccacgcggcgaggaggcgcggcatgtgctcgccgtccgcgacgcagctccgggcccacccccagagcgccgccgcgtagccgcgctgcgactccgcccacgcctccatcgccgcgccccacccgcggagctccgccccgagcgcgcccgccgccgtggccgcccgcgcctgccccggcggcggcggcgggcccctgacgcctccctcgccgcccgcagccgcgcgcgccgccgccgccgacgacgacgagaggagcgcgcacgcctcgtccgccgtgcgcttcatcacccggtgcgcatcggcgatcaccatccacatcctcgccaacctaaaacatctcaaacaaattaacaaaaaaaagaggaaaaaacatctcagaagatcagatcgatggatggattggcattgttcttgccctcggatgagctgggcgagctgggggaggagctcgtcgtcgcggacggcggcgatccgcttggagacggcgtcgacggaggtgatggagatgtcgagcttggtgcggaggtctctcatggcggccctggtcctctcgatggcggacggctcggcgccattggcgtcctggctccgcagcagcgcgcacttcctctcgtacgacagcctcacccgctcccctgccttcaccaccaccgccatggaaaacgaaatgaaaagctcggagctacacgaagacgatgacgtcagagtttggaagatatcggggtctctaccttgacttcctcgtagagcctcttctcccactcgtagagcctatcgaggctctccttgtggctcttgaagagctcgaatggctccggcgagacctcgccgccgccttcctcgtcatcaccgtcgctcggagcagctggtcggactgtctacaagacatcaatgatcaatgatggagaagaagaagaggaaggaatggattctaatatttcttctctgttaattaaatggttattttttaaaaaaataacaaaatatatttatatgtaatatatcacttatataagcttaaatttaacttttacaagttataaaaaaataacaaattgagtatacctatatttatataggggacatattcggtcaaaactatcaaataagtaaaacccgtggaaaccatatttaaaagttttataaattcatgaaaaaattactagagattggtacaggaatgaaatacattcataccaaatctcaagtccaaactcaacttcatttgagagaaaaaaaagacaaatttcgtgtgaatagtaacataacagtattcacccgaaatttgtgatatttggtatgaatgtaattcatgcatgtccctatctctagtaattttttcatgaatttacaaaaatttagatatggttttcacaggttttcatttatttgatggttttcacttgatatttctctatttatatataactatatttgcagtttaatttgttatttttgttataactcgtaaaagttgaattttaacttgtatatttgtaaagtgtaatacatcaatctattttgttaaaatttttagaattattctataactatttagtttagatgcgagacattgttcatcgagtacttaaaaaccttcctgaagaggaagacattgtttgcgagagattaactacaagaggctgtaatggcgtgcgtgtacctttcctctggtaggggacgacctcgaggaggacggagacgtggttggcggtgtcgacgatcttcacgaagtggccctggatgtccctcatggcctccgccatgctcgccggtggccggtccacgtacacggtgaaccccggcgtgctctgctgctcgatctcctcgctcgccacaaccctcagttcgttcttcacgcgatccaccgtcttctcttcctcctcctcctccgccatcggccgctccacagccgccggcgaagcttccgcctgcagcttgacatcgccgtcgccgtcgtcgtcgtcggcggcgtcgtcgctttcttcttccagctccggcatctgctcgtcatcttcgtcatcgcttctcctcctcctctcttcgtcatcttcaacgccatagctcacgtattgttggtgatcgtgatggagcgaggagaaagggtcccaagagacgaagtcccatgtcgttgtcggctgcggcggcggcggcgaggccggcatggcattcaccggagcgtacgacgaagggtggaagagctggccgggatccgcgccgaagaacccgtccaccgtgacggtctcggcggcaacatcattctcctcccaccgctgctccacctccaccaccgggtgcaccggcgcgccgccgccgacgccgccggcgtctggtctcagccagttcatgacaagaaccttcctctccggcgagcacggccggtgccggcacggcgccgccgacgacgccgccgtgtcctggaggaagtagaggtgctcgtcctcggcgaggcagtagaagagggcgagcgagacgcggcggagggagtgggcgtaggcgacatgggaggaggcgagcaggttcctctgcgcgatcgccttcttcacgaagctcctccggtcatggcacgtcttcacggccgcctcctcctccaccttcttcgacgacgagcaccccatttttaatttgatcttcgaaattcagatgaaccggggtgctttttatccatatgtgtgatgaacacgaatcagataggggatatatatatatatatatatatatatatatatatatatatatctgtgtgtgtgtgtgtgtgtgtgtggtctctgcaaggaaagaacatttaatttcttggatgaggtaactgaaggtgcttgcttataccaagggatccttttgtggctttgcaagatgaacaaaggcagtggtgattcatattattctgaacttctgttgtaagttagggaaaaactaatgaaattgaagttcgcaaaggatcttgcacaaggaagaaatggatacgaccgagacaggtaaaaaggtctcgatgcatggaggagagtctaccattgacccactttaactcaattaaaaataaaaaacaattcatactgaggcatttaccatttaggctgaatgtttgtgcaggtaatcgaacttgcaagtatttactctgatgcctgaactacgaagagtattactcgttccgccgttccgttttaggttataagtctgctttaagtttggttaagtttgtagaaaaaaatagtaacatttttaacctaagacaaatttatatgaaaatatattcgataactgatttgataaaactaatttagtattgtaaatattactatattagtctataaattttgtcaaacttaaattagtttgactttaatcagagttaaaatgacttataacctgaaatagatggagtagctagcaatcaataatattttatgtgtggtattaatgttagaatataacgaaaatgccaaccgcggagctcggacgactacccgaccagctcgggagctagctccgacgctgctaaaaggttgagtttaaatgttcgtttgaacaaggtaatttgcgacgactgaataaacttgatagtttatgctgcccttcttaatttattcatcggattattgaaatagattatttgctccacactttaaaaatatggttgctcaaaattcttttcttctttattatttacataacttctttttaaaaatattaacatttttttaaaaaaattaatttatccctataatcaaatagataatccgtataaataatctaaatcaaacgggccggtagcatattgactaacaaacaacaagttatctgaatttaaagcatcagtttgaataaaaaaagttgtgtgtacaaaagatgcatggtggaatataatgcacctaatgccaaatctgaaataccaaatccacgttagctgccgaaacttatatctccacctgaaattcaatcccctctaaaggagaaaagtggatttaactgcatttttgttgtcatatatggttttatttttttgtacaaatttgaatagttttacatggattttctaattttgcatgaattgtgagtttgtcctgtttaggttagaacaattcattgttcaaccatttatctttgaaagaatgggctttgttcaaggggttaggtaacagcggagagatgtgatacctatgaaaagcaaacggaaaattttaaattccgggcggttaataaatctagacactccctaaatactatataggggaaggcatgaatattttttcatcaattgtaattagaacgtatattgattggtaaaatttgacattttagttttttttttgcgaggaaacagggatcactttattcaatcaaagcatcgacacaaactagttgtgcgatagcattacagctattgtctggccagaagtgagtaagttcctccactcggcctttattagctaaaacatgactaatacggttttgattcctatgcaccttagcaagactaacaaccctgtttcccatcatgaggtcgtgcacctccttgactaaaaacatcaactccgatcggaccaactccttggactggagcaaattcagcatctcctggcaatcagtttctatgatgatcggtagcagtgtccattggagagccataagtaatccctcccgacacgccatcagttccgcttctagagcacctgtgcaccgttggatgtaaccacaagctgcaaagatgacttctcctagtctatttcggagcaccacacccaggccgcctttccctgtatcaggttgaaaagaaccatcaatgttcaacttcatcagtccctgatctggcggcttccatccgtgcagaacatcatcttggggattgactgtcctatgcactttcttcaccttcgcacaaaccacatgtttgcctttaaccagattcgcttcaggtttcttcagacattttagtatttgaccctaacatgttttatatttatggaaatataaactataagatttatatatatcatatttagcaatacttttaatgaacatattgtatgctaattacaaatgtatttacggaacagaaactaacatttggacatcacaacagattatattctgaatacttacaactatgtgtctatgacaacttcagagttgtatatcaaattcaattcaatttattttaaaaaattgcttcacacaatattatacaggaaaaaaccgctactacttactaacctgacatgtaaaaactcatctaatagtatcactgttattgtaaatcaagattacaagctcttatgagcatctccagcagggaccttaaacccagtccctaaacaaattttgagggttaacataaaaaaactagatccagcagagaccctaaacccagcccccaaaatgaggaggccctcagatccacccccaagcccctagtcctggggctccgagcacagcccccattgacatttttctggtcccaaacgacaattcactttcgtgctctcatcacattcctgcgcggcaccgcgacgctggatctcatctgggctccagcgccggcggccatcgattcccctgcacctccggcaagattggcacaaaaaggtgagaatttcccctacctctgtcgcccatcatccgcaagggtctccggccgccgccctcacgagtccgccgtccacatggtgtcgcacgacctcccgccgtcggtctgcacgttgctatccacacaccaccccgcacagccatggtcctcccgctgcagagccatcgtccctaccgctgtccacccgtatgccgctatccgctcgccggcaggagagccaacggctgcccgcccccacgctgccccattggcccaccggatggagggccgccgcctgcgcactgccggagggccactactccaagccagcccacacgccgccctctgctcgccgccctttgccccctagagttttctggattgatctaatctgtgtggtaggagtactactagcagagaagtagtagtattatacttgaccactttttgtgctggatattgatttgttttatatattttttagaactgtaggagtagtagacttcttcggtggtagagaagaatctcaaacactgtgcttgtactagtagcactgcactgaactgtcgttgctatggatcagtagagttatcggttagtatgtagcacttctttttataggctttgattattatgaatataattgtctagtttgttatttgagatagtggaaattaaattttcttatggaacatttgtgggcgcttcatggtgctcgatagtttgtttcgttgcattttttgtcaactatgggtcgtgttcaatattttcttgtaggacatgtcattctcatgttaaaaaatttgaattcaaatttgaatcatggtgtttaaaattgtaaatttcaatatggttgaatttcatgcgctagaattatttatgtttaaattattatggtgttaaggtagacacaaacatacaatttatactaaaataaaagagaaaaagaaataggggctaaaatatagggggctactgctagagttaatgctatttttagagtcataaagaattggtggcagcccccatttgatctttaggagctctaaagtaggggttactgctggagatgttcttagatgtcttttcacatctcgaaaggccacaatgctgtgcacttaaaaaaggccacagattctatgacccaccggcccacatgtcagcgtcctaaaccaacacgagacgcagcgctcgcaaccgtatcagaaaagaagaggcgtcctccaatcagagctcgagacgaacccaattactagcagcaccaaaatataatcagatccgaaacaaaaagaaaaacaaaaaaaaacacgacgacatctatttaaggcaggatccacctcacccccgccccgcccaaatcgctccctccccttccctccccgaccagatcgcgacaccgccaccgccgatccgaaggtcggcgacgacgaccaccaccgccgccgccctcgtcctcgccgccggcggccatggcgttcggcgaccgcatcaccaccttcgaggactccgagaaggagagcgagtacggctacgtccgcaaggtccgtcaccccccctcctccccccctctccgctatactcctctgctcgcattgcttccaatgtagatcccaccgtgctcgttccgcgcgatcccgacggggcgcgggctctgtggcggcgggggcgtggtcggatcggggctgaattggcgccgagatttggttaggatgggatggggtggtggtggtgatggcgcggattgctttggggatctgtcgcgggcgggtggctagatagggccttcggatccagtctggcattggtggctagctcgcttggtcgggtggggttttgcggagagtccgtgttgctgcgcggctctgcttgagattcgcatgtggtgtggtgttctgatcgccagtccgtaccacgccatcatataatgatatgatcttttgttgcaggggtatcgctaatagtttaggttttactgtgaactcgtgactagagcggtgctcagatgtgttttgacaatttgactgatggatggcattgctattagcgtggttggatgtaaaaataaagttgttcgtttgttgtaatttaagaaccactagaagatacactggcttctattcctctcccggattatggattgaatgatgaaccctggacgaatagtgtgcactctcactctctgcttaatttcatcgaatttgctactccccttgttctaaaatataacaacctagtacaagatttggcatcacctagtaggagatctgtctagaatcgcagtactcggtgttatattttgggatggatggagtatctatttagaaacaatacacatcattccaaaaatgccatagttcaactgaccgtgccactcaacaatgaattgcgtcactcatgtatttctagataggtttatgctagatttagtgtttgttaatgctaaactgagttttctcatacttatgtgttggaatcgtagatcctattatgaactcagtgctatcgtatctgtctggtagaatatttagatgtcatcttatgctaagatctgcttcctagttatatgcgcactagtaattgccctttttcttttgtatgatggcatgtttagctcttaatttcattgtgttgatgaacattattgatcgaatgggttgttttaggtctctggacctgtggttgtggctgatggaatgggaggtgctgccatgtatgaactcgtccgtgttgggcacgataatcttattggagaaattattcgtcttgagggggattcagctacaattcaaggtgtggaacagctctttagtttctatctttaacagcatacagacacgagttctgatagcaattatatgcctgttgaaaccatagtcaatatctaacatcagaaatgttgttatttgtgtatcacagtttatgaggaaactgctggactgatggttaacgaccctgttttgagaacacgaaaggtgcttttttgtcatttattaaactgatctgtcaagcgtacttgtttttgcttgtttttaacacataaaggttatgcctgcacagcccctgtcggttgagttgggacctggtattcttgggaacatttttgatgggatccaggtacttcaagttgtgaatgtggagtaatttcatttattttttaagctccttgcactccttgtctgttaactcttgtcatgtcctttttcctatcgtgtttgcagcgccctctgaaaactattgctattaaatctggagatgtgtacattccgcgtggtgtctcagttcctgcccttgacaaagatgctttgtggcattttaagccagaaaaactaggtaaagtattttgtatacttcaggggggaggggggggggttaccttttgttatcctttttcatttagcatgcagtgcaaggcactctaaaatcatctcctattatcattatgctgcaggtgttggagatattatcacgggtggagatctatatgctgtaagttaccatgaattttgagtttcgtcttatatggttatcatgaacactatgcatcaagatagtagcttgagatctgtcatcattaatcatgtgcctttgctaaagttttctgactatatggcagattgtcaatgaaaatactttgatgcaacacaaggttgctcttccacctggcgctatggggaaaataagttacatcgccccagctggtcaatatagcctgcaggttagtggatgctatcagtatcactttatcccatgtcctattgatctgcatgcattctaactttgcttaaccttgtatggaaccctgcttttgctataaatgcaggatacagtgctagaattggaatttcagggtatcaaaaaggaatttaccatgctccaggtaaacaagttccatcttttatgaagataacatgtctgaggattaaagcattagtttaatctgttgtactgcactacagacatggcctgtgcgttcaccaaggcctgttatggaaaaacttgctgcagatacacctcttcttacaggacaggtttgtacagaacctaccatggttctcactcataataatatgtgcttttcctccccatttttattaaggtttctgtgttgaaccactaaatgctcaaagtactgttttccccctcttttttctactcaactaatctaattcttatatacttttaaacgatcccagcgtgtacttgatgcattgttcccctcagttcttggaggaacatgtgccattcctggagcttttggttgtggaaagactgtcattagtcaggcactttccaaggtgatcactatttttctattcctcattgccatgtagtatctatagaaactatactctctttttgttgccttgatcacatctttgtactgagatgaatagcctctcaaactctgcagtattccaactcccaagctgtggtttatgtcggatgtggcgaaagaggaaatgagatggctgaggttctcatggactttccccaattgacaatgacgacagaggatggacgtgaagagtctgtgatgaagagaacaacactggtggctaacacatccaacatgcctgtcgctgctcgtgaagcttccatttatacaggtaatggtgtattgctcctgattgattgctacattaagccataatagtgtctgatatccatatagtgtgccccactttgtcatatagtagttgttttgttttttagttgtcatatagttgtttagttttgtatggatcccagcaatatgatgttacatcaacctggacatgcctacttatttggtacgagtactagttaacatgtatccacgtttagaatcttcacaccgcacaacagtggctgaaagtacaacattgatgatatatgcatctttgtccctggtttatctgtgtataagagatgcagggcaaaatgaaatgtagatgcgcatttattcctgagacccacacttgtatattattgtgaaatatattataaaatcttgatgatgaaggcatttccctccccaactatattttcaattgttgctatccagttagattttttgtaacattggcttatctatatgtttaatttcctgttgctttggtcatttggactgctatatgtattttatggaccttaagttcatcaccaatgatctcattgtaaacaaaatcttatatgactttgccccccaggaattacgatagctgagtattaccgtgacatgggttacaatgtcagcatgatggctgattccacctcacgatgggctgaggcattgcgtgaaatttctgggcgtttggtacgttgtttttcttctgccatacttgccctcatttcctttttgtatttctcatcctagtgtactttaacttgcacaaagctctgtcctattctcattggaaagacaatcagcttccgatttcttaaacggtgtgccgacatatttacactagcagttattctttcattgtgttttcactagtagttatgatagcctatttacactaaagtagttatagaatcaatttacatcatttactgcaatattaccatgtatggctaaaaattgctaactgctaatatagcctttggaaatagaatacttaaaagttaagattgttataactcattcgtgttgattttttgaatatctattttatgttaatattctaatgggcaatgccacatttttgttatccaggctgaaatgcctgcagatagtggttaccctgcttatttggctgcaagactggcatctttctatgaacgtgctggtaaagtaaggtgtcttggaagtccaaaacgggacggaagtgttacaattgtaggggctgtctctccacctggtggtgatttttcagatcctgttacctctgcaacccttagtattgttcaggtaaggaagcagctaagtctgtcatgattaataatgtttatcgtttcagtgttgttaaaccacatgttcttgtttgtaggtcttctggggattagataaaaagcttgcccagaggaagcatttcccatcagtgaattggctcatatcttattcgaaatattctaaggtttgttctgacaagcaacttgcttaaatagtttattctcccctcagattccaactgtaagttgatttagacttgtgcacaaagattaagaaagtactaaaatgaatttgttgccattcatttattttcatgaaaatgcaagagaattgcgtttcatttcattaaggggaagaaaataaagtaattttttttgttgccattcatttatagttttatactattgaaaaaatggaacatttatttgtgagagctgtagcacttattttatttgacaagggcaaacatgaaagagttcactataagttgtttttacttttttctagtcaaacttaaaagtttgtagaaaaatatagcaacattttcaacacaaaacaaacatagtatcaaaatatattcaatgttacatttgattaaactaatttgatgttgtaacttgtaaatgttgctaattttttctataaacttggtcaaatgtaaagaaatttgactaggaaaaatgtcaaagcgacaaaatataaaacggagagaataggaaggagttgagtggccagaggaagtagacaacaggtctctagaataacagaactatacgagtttctatggttataatttgttctaattgtttttggtcttctaactcatttttttcaatgaaatgctaataagtttatatttgaacattttcctgttcgttcgcatttgctttgatgttatgtgacaatacaatgttttgtgttgcaggcgcttgagccgcactatgagagggaagatccagatttcattgatattagaacaaaggcacgtgaggtgttgcagagggaagatgatttaaatgaaatagtgcaggtactattttgagccttgtgaatatttactctcctggaattccacgatggtttgacctgtcttattgaagttaccttttctcatactgtcgtatccctcctggctgtaatgcttcttattaatctgcatcatgcaaatgtaacatcctatcagaagtgttcgcacatattacttgcctaccataagtgctttgtaccagtttcttggcatttgttcacttaatggtcctgctaatattttgaaaatgataataaacttgaccttagtacgtacgttatttttaaacaagctgtggcataagtaagatttgagcttttgttgttctttgtgtgatatttattgttgactctaccccacattcagcttgttggtaaagacgcactggcagaatctgacaagattacactggagacagcaaaacttctgagagaagattatttggcacaaaatgcattcaccccgtgagtgttaaacccatttgatagttctactaacctgtgtcataatccatattaactaattgatcaattctgttgcatgaaacagatatgataagtattgcccattctacaaatctgtttggatgatgcgcaacattattcatttcaacacattggcaacccaggtaaattctcttgttccaggaattcgataatttgccaattttctttagaaaaccaatcctagctgactagaaaatcatgccaaaactttccaataattgtgttctatcagctgtcactgatgctcgtgagcttatatttaaatcaatctgggtcacctagaggccccaaatcccaagatcatagagtggcgtgaaactgagacactggttcctgtttgatctagaatttctgatttctggaacaaaaagatagtagtatgagttggatttatatacggagttctaggttttggattactggcatagataggctctggatcgatttgtcacttgaatttaaataattgaatcctagcatgggcatcagcatggaacttcaacacttaaggtatcatttacattgaaaggtgaatgagtggagctaattgaagacaactgaactgattagaggcactgtttgttgtatgtcatataagttactcattgtttactcattactcaatataattacaaataggatattcccatacaaaagtagcataagtactattttaataatctgtatgcttttattgttttataggcggtggagcgggcagctggtgctgatggacagaagattacatacagtgtcataaagcatcgcatgggcgatctattctaccgcctagtgtacgcatttctaccctattttcaagtttctaacactcgctgtgtagattgcaatatgaccaatggtatttgttgcttgtcacaggtcgcaaaaattcgaggatcccgcagagggcaaagaagttttgattgcgaaatttcagaagctgtacgatgaccttaccgccgggttccgcaatctagaagacgaagcacggtgaataattattgtagattctgtgtaaacaataaggatatatcaccaaatgttctataaaaaaaacatggaagcattccatttgctgctaccgaggctctaggtcgagatcatgtagaaattttcctgcaactatacgcgccgtcgtcgttttgtcaggttttgatcccaagtgctcgatggacacgccattatttctactctatgtatcatttatttatcatcttcattcacatcattgtaataaacatgggcatgtttatagtcgaataaatacgatgtccatctgtttaaaagtcttcgttgaaggtcattcatctttatttgttcgttgaaaagcaaatgttgcttagttttaggtatctggctgtggcagtttatgatgtggtacgatgagcaggtaagagatatgtaattaactttttgagtactctttttttctttattgtacgattgaaacttataggccagaagtatgagttagtcacaccaactaaatgcatttagacctttgtttctgtatgtcaaattggaaggctggaattacgcagccaggttattaacacaaaactcatgtggtaggcagattaagccaatccacgctaataaatattgatgctgactcgcaaaacaatcaaaatcatgctaatttttgctgttttattgccattattgaatcccttttgcactatgctggaactggaagatgctgaagctggagagtggctagacaaagctatgtccagtacagatacagtgcacattggcatattactgtgtttcttgtctggaacgcagcagcctgtacttatttgactcgatccatgtgaatggtttccacagaaattccaagctttattaacatttggggccaatcaataatgtccaactcaaatcaacggatcaaccttataatattttaatatattattacattgtgatccctgttgtaagtgtgtgcagagttttaaatttgtcaatgttgtcttctcctaaactcctacttgtttggctggattctccttttgcaatatactttatttatttcaacctaaaattctcccttttctttgttggttatattctatttccaaaacagaacaaaacaatgttgtttctgacgtgtacaactcctacagattagcgataaaacgagtgttgttttgacttttgacactttgagcatgagtatattagagttggtttctctattaattaagttctaagttaacatccggtgtagtgtttcaaatcatacgatgatccatcgtccacggcaaggcatgcatatgcctgaaattgaacagtccaaaacagaggtcaataaccgcagcttcgtgggggcacgacaagtctgtgaaatattctaagggcaaaaacaatgagcctagcattatcatttattgaggacaatttgagcataaaaatgttatccactattggagacacatagaataaaaaaagagaggcaaatttggcaaaactgcatttaatagtaactagttcatggtagagtgaaatattcccgcaatgcctcgtttgttcacaatatttatccgcggtacaatgtgtacataaaatttgggcaattaatacatgatgtactttacccgcacaaagtattcaattagatatatagagagataacacttcgataaaccaaaaactccgaggatttgccaatccgttctaccattaattaatcctttcatatgcgtatgacgtgggttttggtcgcgtgttattataaacaacaaatgctagatttcatcttcaactactactacgtacaagggagagtggaatgtcaaatcataaaaatccctgcaataaccacattctcctatgttgttttgtgcacaaacacaatggatcaatattgccatgtgaaagaatatctgggcagtcaataaaaaaaatgtatacactactatagcacatcagatgatctgaccaagaggagaagaagaagagagaggatcccaaccccaccacctctcctcctcctcctctctctctctccgatctgcctcgccgccgccgcggctgctcttctcctctcgcctcgcctcgtgcgcgcggcgagttcgacctcctcctcctcctctccgagcccccgcctcccctggctgcgggcggggggtttcgagggggtggacgcggcctccgtgtcggcttcggctcggatcgaattcaaaggtatcgctcgagctctcgctgctcttacggcggcgcttgatgagcaccgcggcgtagattgtgagatccatcgggagttgggattgatttccttccttttccaatcagtttaccccggatttattttattaatttgatgatacgtgatggtttagtattattgatagcagtttgtttccaatattgattcgacgagggttctgctcaaccctatattccccacgttaggtccggctccttgcgccggtattcacagctaattgtattatgacacttagagtgtgatttgtggattaatactttgttgagtgtgattggtggattaatacaatgaataaccttgcatttgcagaagaggttggaaaccttggtggtgtagttagtgccaccgcccctgtctggagtggcatgtagttttcgcaaggctttgtttatgattttgtcgatggcgaggagatgaaggcatcgcaggtgtggcaacggggcagcaaggacatgacagccatgccccctccgcgccaacgaggcgccgccaagaagcccatgtggataatcgtgctgctgtcgctggtgtgcgtcgcgctcatcggggcctacgcgtaccctccgcgccgctactccgcgtgctacttcttcgcttcgagcgtctgcactcctttcaaggattggctccctactgtgacccgacgggagcgaacagacgaagagatcgtctcgtctgttgttatgagggatctccttgcaatgcccatgcctgtctcgaagaatccaaagattgccttgatgttcttaacaccaggttcattgccctttgagaaactatgggagaaatttctacaggtgtggcgcagatatacccatcatgtgcttctttctgtaatgaggatggagtttgtactatgtatagatgcatcaacatctagtttgtaaaatttatttgcttgaacttctgtgtgcagggtcatgaggatcgatattccatttatatccatgcatcgcgtgaaagacctgtacattctagttctttgtttgttggccgagagattcatagtgaaaaggtactaatgttcacccccacactgtgtacttgtttgtttcttttcttgctttatcttaactcatctgcttagcaaggtgttatgaacaataagaaatgttgttatgcattgacaactgttccttttgtttatactaagaaagaagaaaattgtgttattgcttggattagttttcgatgactataagtgagattacatttgcaaccaatgacctgcatataaggcaagcttttaacaaagaaactctatgttgttaaaataaagaaaaagaaatatctaaattcaaaaagaagaagatttgagcctaggtggtggtagtgtacacaacccacacccatcagatgagctaggcttagttcacttttttttttaatctggcttgtacttcctgtgtttaggaaattccatgttggttctcctaagaagttcttactttttagtagtacattttgcagcaaataagcaaaaggactgtgatttgtcttttgaaatttttgctatcagtgattcctgtgatttcttttacatccaacatagtattttataatttgttttgcagaactaaagcattgcattgtctttgtatgtgcaggttgtatgggggaggatttcaatggttgatgcggagaagaggctgctagcaaatgcattggaagatgttgataatcaatttttcgtcttgctatcggacaggttttgtttttaaaaaactttgcctgcaaaaagaaaatgtttttgttgcactttgttaagatcctttttatttgtttgacagctgtgttccactacatacatttgattacatatataattttttgatgggaacaaacgtcagcttcattgattggtaagagcgctgaactcatattttgatccatttgacaagaggaaaatatagtacatacaagtgcaggaaatagctactttcagagcatgtaattctgctttaaaaaagttctttggtatattgattataacatttctactttaatttcatctgtgacctagagaataactgggaatatgaaaatcaggaatatttcatcatgcattttattctagatcaatcttttggcttatatttctttacaaaggaatacccttgttacatcacaagaatggtgtagaaaacgttggtgtgttttgacttaaagaatggaatgcattaacacagagctatgatcaccgcacaattttctatctcccctagtcacacatgtttgtgtgcgtttttcattgtgttttttcactctatcagcttccttgatcctggaccacatggaagcggaaggtattctgtggaaatgctccctgaaatagaacagagggacttcaggaagggtgcccaggttcatatttttacattactactttattattcttcagaatgtttactaccccaaagtttgttaggcgcttcatatattcttggtttagaggcattcttttaagtcaacatcttcagaaactaggacatttgtttgtgagaatgatgatatatcacttccatctttttatgcttttctaagttggttttcgtatgtgttgtagtggtttgctgtaacacgaaggcatgctttactgattttagcagaccacctttactacaataagttcgagctgtattgcaaggtatgttcctccttcattgattgttaattgttgatgcccatcatgctatagttcatttcacgtgtacagtgattactaagttattttggtagcatctaaacacaaatcctattactatagtgtatctagtagataaatgaaaataaatgcatcttcatggtgttcattgggaaccagccagtaacaggcatcacagtaggtaccagggtaccaggatttatcccaaagagggaaaatgataccctggtgatactgtcagaatgaagatcaaagctaggatgttagttgagatatgaaatttggaactgctattggcaattgtaaagctttagtagagatgataatttggagatgaactgaatttaagacttgtgccacttggttctaagttttaactgctttagccatatgctacaggaaatcaaaagggtgttaactcgtcaagaaaaaaaaatcgtgaagcacgtgtttcatatcgttgaaataatgtatatatacataatgttatttaatacaccaatttttttctgcttttttgtgttctgcagccagcagagggacgcaactgtattgctgatgagcattatttgccaaccctcttcaatgtcagtaaataatattttgaattgatatttagctttcttcttggtcccttgcttttctttcatatgctttcactttcatcttcagatggtagatcctggtggaatctctaattggtcagtgacacatgttgattggtctgaaggaaaatggcatccaaggtcgtatagagctattgatgttacctatgcactcttgaagaacataacggtatgctctacatcggtaaatggacacatgctttcggccctttgccaattgacatgtcctctatgtgtggacacttaccaatgtactttactgttgtgtaggctatcaaagagaacttccgtattacaagtgatgataaggtaatatagcaaatcttctttttcactcaagcacaaaaacaaatataccattactaggattttggtgatgattactgtgtttgtgcacttgtctgcaaacacctgaagatatttgcttttgagtgtctgcatgcaacgcagtcaaggaatttaactaaaacatagaaatgtagctcctacatgtaatattgatatgtacatttatcactatcgcagaaagttgtgacaatgacaccctgtatgtggaacggaacaaagagaccatgctacctttttgctagaaagttttacccagaagctctcaacaacctactgaagcactccagctacacgtccacttgagctctacacgattctttgcttttggcctaggaattccctaggatttatttcttcttctattttatgtaaattgtgaaattgatatttagctgcgtaacacagattcagggccagagacatatcaacgttgctgcggcaatggcgatgtcttgcaaattctgagtccctaggtagggctgaggcgatatttatttagttttgatacagccctcattgtaacatgttgtgcttttttgtatgttgctatgagctgctcttcacgcccacattttctctcttttctttctagtttcctagctcctcccatctgttgaggaataggcgtttttgtcagattggaactgttattatatgatccattctttgtagacatgaagagattattatgacaccagcacaaccttacagttaatctgccctcttgagttttgtttacacatactccgtttctgatgtgcatcattttctcttcgtttctgctgggaagtacagtgttctacaccgtaaactcaccaatttaatcaacgtacgtgtaaatactaattagttgaaaatggcagaaaattattcgaatacatctgatttttattttcagcatatgcatcgttttcatgttattcagctctgaagtgaaaatacacgcgcatctgaatttctgaatgtaaatcagtaactcgtagaaagggtatgtcttgttgctgcataagcatgtagccaagggcatgcatgtggtttattataagtacaaactttcttttacaaacattttacaaacgatgtgattaaatggagggttttcggggagggttttcggggacagcagctgcgggcttaaatgtgtggttatttctgaagcttttacattggtaactcttgttcactaccctaggggaggctagagtagcatggccatggcttgatctgctatggcaggagaagccatcggctttaattgttacggtccttattataaaccataacgatttattagcaatttaagaaaatgatatatgagtaaaattttatatatatgttcttagtgattgaaatgccaaatctaaaaaaaaaatactatgttgaaaaaccatcaaaatcaagttttactattcaaattttggctttggcttataagccataaggcaaacaatgaggcatgtaaagtggctagtgagcgatgtaattgttctttgatctaataaattacctgagttttaaaaaaaacgatgtgattaaatcttgatgttttaaaactccaatcgataataataactaagtagatcaaatggtttatttctttatcactccgaatttatttaaaagctcctttactagcccatttcaacagcccatctcaagtgagcacaaagcgagagggagggcccagcccacctcaccctcaaaaaccctaatcgagcccctcccgcatccatccaacggtcaagatcacccctcctcacgatccaacggccgataccccttcaccgaacactataaacaccccactcactctcccacctcccccttcttcctccccacccacccgccgccgccgtcgccgcccttcgccgccgccatgacgacgaggttcaagaagaaccggaagaagcgcgggcacgtgtcggccgggcacgggcggatcgggaagcaccggaagcacccgggagggcgcgggaacgccggcgggatgcaccaccaccgcatcctgttcgacaagtaccacccgggctacttcggcaaggtcgggatgcgctacttccacaggctcagcaacaggttccactgccccgccgtcaacgtcgagcgcctctggtccatggtgcccgccgaggccggcgccggcgccggcaaggcccccgtcatcgacgtcacgcagttcggctacaccaaggtgctcggcaaggggatgctccccccagagaggcccatcgtcgtcaaggccaagctcatctccaaggtcgccgagaagaagatcaaggccgccggcggcgccgtcctcctcaccgcctaggtactcgggagctagggttcttggcttcttgctatctatctaaagtgttagcttctttttttatctcttgttgtgttggaagacaaagcaaagaaagactacttttgtgctgttgctgctgttttttgtgttatggaacaaattgatggtatggctactaagatctgtggtggctattcatgagttttgattgaattacatgatcatgtaggtttatgtcaaatatttttgtgccgcatatcattctgattattattcttgatatcgaaatgctattgggaatggatggtttgtcgcatcaagatttgccatgtagtatctgtattgcctgtcagatgcggatgccaacctaatgcatttggatttgccttggattttggcgtaacctaatgcacatataaggatgcagttcactctaatatatttttaatagagcagcaaattttaatagtagaatttgttgggattataccggtgttattattcaggttataccattgtatttgggatcaacactagattagcatcacaaatctacaatggttcgagtaaatgtggatattgcaagagagcgagatggcaaatacagcatcataattctcaagttagcacgaagaagatcaagttgtacaagatgctctactcaagtcaagtgagaaggtgactaagttaacccatctatgttaaaattgcctgggatcattaacaacatgaatatggcaaattcatatcaaacttgaatgtccatgtttttgagagacagccattgccattggtacgaggtcaccgaaagggtcaccaaacggattggaagatccagcctgaggtgcagggtactgatgctgctgctgctgctgttgttggtatatctgattttgttgataatgtgtctgaaaatacatgttatggtgatgttgatgatcctggaaatgatgaggctggtagtattgttgctggtgttgagactggtagtactgatgctgctgctggttcagcattgcaaactggacattggatgggggcaagaagctgctcgacgtagcaaatggatcgttggtgtcgaaagggttgggtgctcctcctccaatgctaccggtgtaggtgactccggcgatctgccgccgcctcgtctcgtcttcgtagaggctgtcgagtagcagcttgtcaaagcctccagcctgttggatcagatcagatgcaagtttgtaattttttttggtcgtttttcagaagttttagaaatgagcaacagagcaaatgttatacttcctccgtcccataatataaaggattttgcatttttgcttgtactgtttgatcactcgtcttatttaaaaaatttaggaattattatttattttttttgacttactttattatctaaagtactttaaacacaacttttcgttttttatatttgcacaaatttttttttgaataaaacgagtggtcaaacattgtaagaaaaaactaaaaatctcttatattatgggacggatgaagtatgaagctagcagcaggtggagtaaagatttgtgcaaaccaatttggtttgaactgtttggctggtgctgcttggagcagtgaccagtgcaagctcccacccagatgtgttgccagaaaacaagtccagggaagttgatgccttagtttgatcacctgcaagcaaaagaccaaaaaaacacacaaaaaaaacattgatgacttcttttttggctcatttaaactttggcagcaagtccgcaaatttacagctaaatttaagtggccaatgttttgttatttgagattaatacagctaaatatacctgttcccacaattgctagggcccatgcgttgttttcttccagttctgcaaccaatggactcacctctgcatccaagttctgcaagatataaaacaaaaacagacacaaagaaataagatttagggaagtggacacttggattagcacataaatggattagagaaaatagtgcagaaaagtactagtagatctccagtggtttctggtggctttggttcttgtttaggctcttgttcttgttcagactctgcaggctcatctttctcctcttctgctggtttttcagactcctctgtagcttcttggtcgtaggtcactagcttcctctcaccattctcctgcttttgcaacaagaattacgaaaaaaaaaatctaaatccctttctcaaagtttgcaaagataagtttagagcagagtttgccttggttatccatagggcaaaagaaaactaccacccacaaatttcagaatggctagacagtttctaagtattttcacttgtataaacatgtatttataactttatattattattatatttattcactgtaggagcctctcctacagtttttttcccaaaagaaacacaagaactacacaaacataatagtactaatagaattgcactagttcttaagtacttgtttctcatgaagaaccgcactcaccacgctgttaatcgagggacggggtgcttctcggatgtactcttccattgttgcaatgaatgatgatggtggctgcagaatataatgtgcaaggaatgagcattagaaatccaagatcatgagggatgtggccaaattcatgaaaatgtttcgctatcttgttgctctgatttagacctaagataatcttttgagatcaagatgatgaactaacctgccttagagtaggaaactggaatgtcctggcaagctcaagttgtttgcaggaatcgtagaagtcagaaagatcttcagcctgtgcattggacaagcatgagggtcaaccattttcatgaaagaaaataccagattataaaattgagatatatacctgctggccagctcgtttatagacaacaagagccttgatagcatcatactttggcatatcaaagaactgcatcataacaataagaaccagaaatttatatttacaattcagcgacactgaaagcgataacctatctaggatgatattgtaaagaattcttctaaaaatggggcaccttcttcttttatataaaacatcgataacagcatatgactgtttaaaaaaatcataaagaattactttaccatatcaacaagattgatgataccatcattgattgcacagtagatcttgaagctctccttcaaaacctatagcacatgtgaaaccaccatatgatatttaagaacaaataatgtgttggataaagggatcagtaacctatgcaagatttcttgcgaattaaattaccagggctaatgcatattggataaggtagttcgtgcctgctgcaccttcaggctgcaatggcaaaaaaatatggatgaagctactgacaacatccaacaactttacaaggatgtgctagtaaaacattttggttatgaaacctggcagccaattagcctgaaaagtagctgctgcaaggcaggcaactgctccagaagttcaatgcaaggcagggttctagttctactgtgtgcctgcacttgttaggattaacgaaagtttaatcatcatgaggcaaaacatctcattcactacatggacttcgttttgataatgtgagaaagataatgttaaccttgctggaacactcaggagatctcatcagacgctcggtttcgatgtcgaatttcaagatcctgaaacactcgagccgttcttctaggaagagcgcgtaggcgcgaacccacgcagagcaatcccaagctggcaaaaatcaaggctagctaggtgagttgatgcatcatttctatcctccaattagagtttgatttgggaaaaatatatacacatgactctctgttgcattgatcactatgcaagatagggaatcacctaattggcttgaatcgtccttgaagtttgctctctgcaaaacgcttcccttgtatgagtaggccaggaactcttctttgaatgtaggatcaccttctctcaagagcctatgtaccactatcaatgtcttcaatgcaacctataaccaaaaaatgtccatcaacaagcacattatcgagataaggaatataatcaaagaggactgtaagagcaagacccaactgtccaattctttgtcttggacaatctccttgacaaggcatagatgcagtattgaacgtccgctcgagggcggttaatggaggtcgccacgaatatttctgcaacaatgtgattagaaaaaaaatggattctaagattatattacctgctgaaagagatacattttggcattaaggtagccaactaaattatggaggagaagatgatcgagtactcacttctaacgtgcctgtccttgggagggcattctacatggttggtggccttcacaattgcaatatccaactcctgccattgaaacaattaacccagcaaatatcaggtaacatactaccctctttgtcaaaaaaaaaaaaacccaataacatacaaggatgtatatagataaatgtttgtccaaattcattctagaaataaaggatgaatatagataaatgtttgtccaaattcattctagaaattgattatttttaggacagagggtatacaaattatgcatttgccttcatcctgagacaatgcagcatttgcatggacaaatgcagctaagctaacagaaaaagcaagattgcaagaccatatgaacaaaattccctacaacaacagcagcaacaacaacgagaaagaaaggaaggaaggaaggaaaagaaagctgcaagaacatggacaagtcgacaagaacaggagagaaattaatggaggagataaaaaaaatgtagtgaaggtgacggaccttgaagtcgctgttgaccttggcgaggccgaccttggtggagtccttgagggcgccgtaggccttgcgccgccacgaccccatcgcgatcggcgcgacggcccggccgcgggcgtgcgctgagacctccggacgcccgcacgtactctctccctccctcccgctacggacgacaacgacgacgacgacgacgcaatgcgacgcggcctccctttttccgatcaactcctccctctcccgctaattttagcccgcccgcgcatgcgatccaccgcgccgcgcgcgagctaagctccccaactccctccctttcctagctcgtgcgcgcgctcgcaatccgcgtgtttgcaattttatttttgggttgattggaaatatgcccactcaggtaaattttattttaattcatctagtcgtattcatgtcattcgaattcgcacaaaattaaaatcataccatcaccgtcacattttcggttatcatacagaccaaaatacccctagacgactagacgtgggacccacattttagttccatcttcttcctccgttctcccatcttctttctttcccatctctctccacatgctagttttatcttcatcagtgaagccaccccacagccgtcgtaaccctagtccccgcaccctactcctctccttgccggtagcaagagcttcgacaagtaggggtgggcatttggttagaccgaaatttgtggtctcggtcttcggtctttcggtcatttcggtttttgaaaggtgaagaccgaatttcaacgcaaaaatattagaaccgaaaaatttcattaatgaaaatgttgctaaatttcggttaggaccgagaccgagactgagaccgaatttgtcggttatgatatttttgcgttgaaattcggtcttcagcaatattttcaatgctgcctgaggaggaggccgagcccgacctcgccatcctatgcttgaggtcaatgcattcctcgcctgaaggaaggaggacatcctaccgaccatctgagtcagctgacacgtcgaataaaatcggagtcaaaaaccaccgagggaacttgcactggatttgtaagttgagagatgcgttgtatccggttttaaggtcgagggacgattttataactcaatgacaagttgagggaccttcggtatacattttccttttccgaaacagtgagcctctacacatgtctgtcacacaagcccaggtcggcccagcctagcccagcccaacccatccccaccccgtagcgaacaaatccatcccttgaccacccacccacccttcctcctcctcctcccgtctcggaagccaccaaaccctagccgcgagccctgacgttgcgaggaaggggaagaggagagatcgagatcggagagatccatccatggcgctgcgagccctgatcagcgagatccgggggatgaaggtgcgggaggtgccggggtacctgaagccgcggctgagctgggagaacgtgaagaagagcagcgaccaggccgtcgaccgctacatcgacaagtacatcgagaccagctcgccggagccgctcttccacgtcatctacggcctcatggccttctcctacctcatcaacctccccaaggagcgccgccacctcgcccacctcgaggagctcgagaggcagggcgccgccggcgccgcccaccactagatccgaggtcaggtgagggttcccccgtctccttgcctcccctgatctgatctgggattttccccgattgtttcgttcggtgccgttgggatggttagattggaaatgttagctatggagatatgaggaaatgtttctattcttaaaatctatcacgagtggttggggatttttttttaatgcatttcaatcacggtgcaggagagggatctggattattatagggaaaaaagtgatactagcttttcaggagtaagtttaattagtttttcatagaattaaatttgtttcataggaaaaaacaaatgattaggaattttttgttttttaaggagtaactttgattaggaatttttttggatcgtatgttgctccatttccaccacggtgaggataatataggttataggaaaaggtaaatgatagatttaaggagtaactttgattattaggtttttagtacaactgaattggtttggtggtcgtgatccatttatcctttgacatagtactgcttggatatcagcaggcctctccaccgcaacaagttacaactttaaatatatatcgagtcctgcagagatctactaattttgtgcatttcacgctttgctttgtttgcttgtcttgaaagggtgaaacatatttattgataatctttagtgtagtgtatggattgaagcaaacatatttattgataatctttagtgtagtgtatggattgaagcatttgctgtgtgaatggatgcatcttcgctgtttattgtagtataaatgtagtgaggaggagagtcacagctattttttgagtcagtgcataggccttgttgttcatgtctgttttgcataattgaaatgaaattagttgaaattatgcatattgctgtcacaccatatgaaacgagcatcttctgacttaaccttggtatactgtgaaataaccttggtacaatatatctgtgaaataaccttagtacaatatataatagcgtagttgcagcattttatgtaatcctcttcaaagttgcatgagttcaattgctacctggttagatcaatgattggcagatcttcttttaagaagaacaaacgggcactcaaacagtcaaactgatataatgttttgttgaacttccaacatgctgatataatgtgatttaggagtaatgtatgcctctactgtagaggagttattcacaagggaaggtctgcaatgcaccttttgattatgcaatgtctctagccactccaatctgcaatgcaccttttaattatgcaatgtctctatccactccaagctcatactcgaatgttcatgatttaaatgttgtcatacgaaccccactgcaactgatgtgaaggctgactacatgccctgttttatctatgctgtattgcaggacttggggtttgtctgtggttgattcgatctaacagaatttctgttcttccaccgatgagctacctggagttgtgatgatgttcgtttgatggtttattttgtacggaaagtcagcaaaaaactttccagtttattgttacattcctatgcatcttatcataagcaacttcaaactggaagtgcatgcattgtgattaaaaactttttcagttaatttgagcacagctgcttcgatatatactctaatgacagctttgtcggtcgtttaatgtatttccctgcctttctcatcttataggcataacatttgcatctgctttgttttgatgcagtttgtatgtcattaatcacgtggtgattttgtggccttttcttaagcttgcaagacttcatctcatgtcttttttttgcttgtgtatccatcgctaaagattgtagcaatcagagttttcggcctgatcttttgttattctaacaggctacagcccatggattgacatgcactgatattctgtcatcctgcaaggttgtggttcattctcgtcatatcaagttgtcaacctgatgaagccatcacggtttactttatttttaatcttttgaaacgaaaatcctttttttttcgagaattcaagttttggccgctgtacttgctgaattcctgtccaacgggaagatcaaattgaaagcaatgcaatccaacagagcccataccgtccgtctaaggtagaaccagccgttgtcgagctttcgatatcctttcgtggtcacgcaatcgaacccacaattcctcccaaaatcgaacccacaaacatttcctccctaaatcgaacccacaatgcgaggctccttgtcgtccttctcgcatggattgcaggttgtttcatagatgagtgcaacattggatgccttggaccttgccccttttgtcggcaggctaattggttgcctcatagatgagcgcacaattggcacaatttgtcattgcaagtgatcaaattatctcagaatttctagttactactgcaagaaatgcctctcttggcaaagcaaagagtagttccccatcgaatggtgcaaaaggttgcttccaacgactagttttaaattccagtttatattatcaagaacaatttacaacaaaataattagacaacaaaaccgaaatacactgttcaattccatcctatgcccgacgtaccatgctcaccatccatactttgcttgagtctctgcttttgtgaggaatcccttggaacgcctctcggcaagctccatctccttttgcttcatgtcatagaatagagaaccaatctggtgctttcttttgtgcagcttggagggctttccttttgctgaaggggcgggctgcgttcaagatagaaatcttgggttagaacgatccttacttaattagcgatgcaaatatggtttggtttttcaaaaatgatatcttatcacttatgagctcatgatgctcactcacaatttagatcttttcaaactaacggtggacatgatgacatataaacaccttatggcaattgcaactttaatcatgttggaaacttatagaatccatcttttttgacaaatttcctttccaccatcatttcaatgttaattactccctccgtttcacaatgtaagtcattctagcatttcccacattcatatagttcttaatgaatctagatataactatatgaatgtggaaaatgctagaataacttacattgtgaaacggaggaagtaataactaagattgttggtcactgataagggatgttggatctgcaaaaaacatcactcctattgctttccaactgaaatcctatagttcacactgggaagctgtgatatatgttccatatgtacataagttaacctaataccctttccacccactataatttaaaccttttatacagaaccagatctagcctacagtcactggccaaataaaagtagatcaaatgttattaatagtacatgcaaatagcataaagccaccacccaggcacccaccaacagaaacgctgtatgaaccataagtaacataattatcaaattatgtccttacagaggttatcagcaatcaataatatggctgacataatgaactgcaaaattacaataagaaagaaccactgtatcatgattctgcctatgtcctccaataaatacttgcttgggagcttgcagcattctaaactgatcacaagcaagtcaaataaatactactgtatcgcttaaccaataagccaattatcttggtaccaacaaaccatttgtaggaataactacagtgtcgggtgctctaaccagtcatagtaatggataaaagattacagttactggcaagagagtgagctactctagaaatctcatcctattatgtactacatgtgatacttgccagaaaaataatcgaacataacaataatgctgcaagctaagtagaaatcataacaagctgactcggtacctggtaactagggccgaaggccatcccagtgagcttggacttatcctccctcggtcggttcttcatcagctctgcctggttaacctctaaaatctctgccggcatatcgctcctacctctcttccctccaatcctaccaacctccggtggcagtattggctgctggattggcggtgctgtcgctgcagccgcattatgttcgtacccaccagcatagccccctccatatgccatttccgtcgaatgcccatatccatcaccatgttctactccgtatgtatttccatacactccaccgtgctctcctccatatgccgcatactgcgcttcagtcccatagttcacattgccgctcggatcccagccatagtttgcaccgtaattggcgtagtaatttggatcccatgcgtagccttcctgtccattactgctcccaactccagcatcatagctttgctgctgattctgctgctgctgtccagcttcggaatcaacagcgagctgctcctgctgctcctccggcacaggcatctcatcgtcatcgctgctcccattcgattcatcgtcttcatcatcggcagaggtagtatcaggcctttcgggggcaattgcgttgacggccgaggacgatggaccagcggcgacaacattcgacctctccggcgcagcggtgtctatggccgacctcctggcggcgccgccaccgccgagcccgagggagcgcttgggcggcgggaggaacgaagagacaggccccgtgcccgcggatacgggcgggcgcggctcggcctcgctagggcggcgcttctcggcgtcgtcgtcctcctcgtcggagctctcgcccgtgggctggcggatcggaggcgggcggaactgcacgacccgcttagggttcccggaggaggacttgggaggcgggatggcggagaagacgggcccggatttgggcgccgggagggaggagaagaggagcgccgacttgggctgcgggagcgacgagaagatgccgccaccggagggcggcttcggtcgggccgcggcggcggcgggaggagtgggtagggtttcgtcggcctcgtcgtcggaagaggcgtagttggcaagaagggaatccatcgcggcttgcggattcgatcggcggcgcgcgggggaggagagcaggggtagacgcctccggcggcggcggcgggtggggttcgattggaggtggagtgggagtcggagagtcgtcggcggcgggcggaggcggaggcggaggtcggggtggatgatggcagggaggcccgaagtggatagatgggccgggcttagggccagattaatggcctttttcgtatagtactggtaagtttctgccttggaatatgtaactttttttttcctttttgttcatataaaagttgaacgattttgctattttacttccgatagatttttggcttctatcttttgcttttccgttcgtatgattttgtaccaagttttatgttcttgtatatccaatttgttattacgctcagttacagtacatttacacttaccgtctatgtagcactcatagtcagttactctataccaaagttaaattttagaattattttgtctctctatatttacaattgtcggcatgtttgtctatttttcttatggttattttatttaaaacgggctatatccattggttaaaagttatgtaaaattcgaagctataaaactctaaaacagtaaaattcatgcattttgaaaagggcttaaatattactccctccatccctaaatgtttgacaccgttgactttttaaaatatgtttgaccattcgtcttattcaaaaaatttaagcaattattaattcttttcctaccatttgattcattgttaaatatatttttatgtatacatatagttttacatatttcacaaaagtttttgaataagacgaacggtcaaatatgtttaaaaaaatcaacggcgtcaaacatttagggaatgaggtagtattatgctagacatagttgcatgctatatgatgccgagagattctcatgttgcccttacaaagtgggtgttactaccataattgggcattgttcactacagccacaaaaagaaaaaaaaaatgtaacgtctcatatgttaccgcagttaccatgtggctctgtaatggagagaattttacatggttttttttcttactggagtatattttcagttttttttagaacaattagattttcagttaccaatctttaaagtggacaagaagcttgaaaaaaaactttgttaaggttaaccttcttcccataatactaagaaaaaagtataatatgtgtattagtttggattgaggtcaaacgtttggtagtgctcttatcttatcttatttatcttatttgatcatattctagaagtttcttcactatactatgagaatttgacttttatattggtaccaatccaaatgttagctgaataattttactttactaatattttaatattgctttggcattgtcgatgaattggtaggctaaaggccgagtctagttgttttggcaaaaaaaattgacatatacgaacacatatttgaagtattaaacgtagactaataacaaaataaattatagatttcgtttgcaaagtgtgagatgaatctattaagcctaattaatctgttattagtaaatatttactgtagcaccacattgtcaaatcatggcgtaattaggcttaaaagatttgtctcgcaatttacatgtaaattgtgcaattggttttttttctacatttaatactccatttgatgtgacaggaaagttggaagttgaagggaactaaacacaggccgagtttagttgtaaactttttctttaaacttctaacttttctatcacatcaaaactttcttgcagacataaactttcaactttttcatcacatcgttttaatttcaacggaacttttaattttagcgtgaactaaaacacacccacagtaaaagaatcaaataagcccatagcactaaaaagttgcagttaggtggagttgaaggtcgccgggggcgggagggagggaccaggtcaggtgcgacgctccctcctgctgggccgcgtggccgtgctcaccgtgtcgctcactcacgcgcgtacgcagttgaagccgcctctctcgccgtctcgcgtacgatcgctacgagaggccaccacgaggccttttttttttcctatctgcttcactccctcttgttcctcatgttaaatacttcattcgtttcgtttcataatgtaagtcattctagcatttcccacatttatattggtgttaatgaatctaaatagatatccgatatgaatgtgaaaaatgctagaatgacttacattgtggaacggagggagtatgtctcattttgtattaggcctagtttttttttcaacttaaaacttcaatttcgatttttgttagtatgttttttaaaatgctaaatgatatgtctgttacaaaagtttctatatagaagttatttatgaaaataaaataaatttattttttaaatttataataataatgcttaattaaacatgtgttagtcatctttctcgtttcacgtacgctaaaaatttctctccaacacgacagaacgaacgtagccttagggtttattcggtttggagataaagtaaaggattttaatttttatggattagtttctacaagtaccatttgggatttgtatgaataagatataggaaaatcaaatgaaaatgttcctttcttacaagtcgtagagagaaaatatataaaaatattcatccactcaaaaaaatttctatggattaatgggttcgtgtattactatttctccacttttttttattttcatgggttgaaattctctcaaaccaaataagccattgagttgtaatattttaggagggaggtagcacgtgctatcggctcaaaagcgatcggcaagacatgaggacagcattccttgatcattggctcttcccattcaagctaacacgactggggggtacacactgttgttagtgctaacaatactgtccatacaagtggtaagcccagtacattgagataccaactaacaccaaacacaagacaggactagcaaagattggaaggaaaaaaatatcgagttggtagttggtactatacaatacagggagacattcttgaccacataaagtctagttgatcaaatcacctttaattaataaccaattaataacaaatcaaattgtactatcatcattgtatactaatactacacagaaaaattagagtcccatccatttggatttagacttgtgatttgatgttaaccacaagagaggccttcctaaaccacaagatttttgggtccttgatggtgattaagaatttgagattaatttaattaattagggaggaagcaaacaaacaatcattgcccacaagtttcgcatttttagtactttctatctcaggcggccggaagattcgtcgtgcggtggccggcggcggcggcggatcaggagcactcggcccagccctcctcggcggcgggcggcgtcgacgcgcgcgccatccacgacgccaccgtcaggagcagcctcgccggcacgtgcgcgctggcctccagccgccggagcagcgcggcctgtccggcgccggggcggcggcggcgacgggaggaggaggaggcgacctccgaccagagcgcggcggccatcgcgacgcggatcgggacgcgggaggcggcgacgccacggcccaccgcgcggagcgccgccccggccgcggcggcgcgcctgcgcgccgcgcccgacgacaaccccatccgcttcgcccacccctccagaaccgcctccgcgcgcggggcacgccgcccgcgccgccccctcctcctgacgtcctcgctctccaccgccgccgccgccgccgccgtggacgacgcggagtccgccgtcgacacgcacgagctcgacgccgtggaccgggcgtcatcctcctcatccaccacctcaacccccaaccggcggcggcggtgcctggacgcgaggaagttggcgccgtgcaccttgtcgtcacataccaagcaaagaaacgcggagtcagcggcgcagtgcaccgcggccacgcccccgcacagctcgcacccggcgccaccaccgccgcacttgccgttgccgacctccattacaggttgcaagaggctggactcttgtgtcactcggtcgaacacctggcgggggtttgcgtggctttatactacagagcaaaacagggacaccagtctccgcgcgagggcgagatggcgatggcgaccggcgggcgcaggcgcgggcgcggcgcgcttcggggaaaccggcggcgagcgggggaaaccggcggcgagcgggggaaaccgcgggcgcgcgcgcggacggcgaggggggaggtttggttgggagcgagacgatgtggattggaatgagtcgagagtgcgaggggagtgtggcctgtatttaaagaggacccgcggccaccggctttggtggtggctgtgcctcgctctcctctcctcgcccccatcgactagtaggattttactttgaccttttcccgctcgtttgtactactaaatactccactccaacatggttttttttttacaaagttctttttttaaagattcaggtgtgtttatttcgcgctaaaatttaaagtttggttgaaattaaaacgatgtgacggaaaagttggaagtttgtatgtgtatgaaagttttttggaactaaactcagctgaagtcacagttttttattgaattatttttcatatataacttagagtataactatatttaattgagctataactataatattataatcacattgtaacattctaacttctatgtagcttactctcggagctgtgttggccaagggaaggataatggtgttcaacctaaggtaaaatatcaagtgttggctagcgatatggtcaaacaggaacgatgtggtttttaatggtgtgttaaaactttattgtttaaaaaaaatatataggtaacttttagggagattcattgggcgcagttttggtctatgttgcttaaattggaggatgacattgtgttaaagaaaaagtgtttcttcaacaggaacatcgggaggagattagaaacttaactttgtattttttttttggttggttaacttttgtttgagacatgttcttcgtgtaaggggttgagtcttaactcttaagcactcttgtataaacttttggccgtgtaatccatttacaaagtagagatcgggttttaactcattatctcaacaaggaaaacagctgcaattagcacaagtaatatgatgccctacaaattgttctaaatttaaaagtcccatcatttggcatattagagaaaaaagcaaaacgacttatttgtaaataaaaaataatttatgaataaaacttttttatatgtgttcttaataatctaaaagtaaaggttaaaaaataaactacgatgaagtaaaacctaaaaaaatttctaaatataaggtttaaaatttaaattttagctaataagtataattatatcttctattatacgcagaacaattgtcgtacggaagctgaccaatgggcagtcggcgcaagagttaatccctcatctaactgacgtaacttttagagcaccgctacacgtactaaatttttcttactaaatttgtactaacaatcatctcaaccgtttaattcaagtagatgaaagttataaaaaaaatctagatacacttatagcatgatatgtcagtgttagtaaaaatttagtaagaaaaagtgagtacgtatagacttttcctaacttttaacacctaaaatatgtactcccgggcaacatgatctgatcatttccctagatcaaactgaaccttgtgtctatctaacaaaatatgacacacatgacaaatttctctaacatatccacccaatccccttccattccgatctttctcgtcgccaaccatcccaattaacaaaaaaaacaattaccacttgtgaataaaccaccattcaggtgtacttttcacatgacactaggagtattattctataccatgttggagtgattatctaaaaaaaaaaccatgttggagtgatgcccgaaatatattatctgttcttctgacgagctagcggccaccgttaaacgacaggtaaataattcttagttaattactccctccgttttaaaatatttgacgccgttgactttttagcatatgtttgaccgttcgtcttattcaaaaaatttaagtaattattaattcttttcctatcattaattcattgttaaatatatttttatgtaggcatataattttacatatttcacaaaagtttttaaataagacgaacggtcaaacatatgctaaaaagtcaacggtgtcaaatatttcgaaacggagggagtagcttgtgtgcttaatgaaattatggacatacctgagccgttggttggggagtcgtagagtgatccttgtccacaaaaacctcgtcgccttcgaagagagaggccagattttttttctactttttttggggtcaaaagagaaatattctttcacctctcctgaaggaaaagtttctacctaagctagttgcttggtttctttcggtttggaattttctaattaatctccaatttgagcttttggattgggagatagagagatagacataattagtatgaataatgttgttttcctgttcactctatctctagtttgtatggggccatgagtgatggaatgtccactgaattattgcttatgaaaatgttatccagtgtcaaatcgatctatttgatctgtctattagctagcttctcttttcatcatgctctgtatgtatggaccaaatcctgattattagatgattagtttagataatgatgcatttccttttctggtgatgcaggtccacatgcatatcagcatatgatgcacctaatttatatatacattttttcaaggatgacacacctgattgatctgaccatccttcttttgtcaagatcaatctttcttacataatataaaatgatttgaacaacaatctcaatagcacagttacacaacaaatcacagccagtttggtttagagccataccaaaatattgatagtgtcaaattttaagcaacttttgacactatcaacttttggcaccattaaatttggtaggacaaatttgctactacctaacagatggagctagtaaaaatgggcaccaatccaatatctagaaacactgtttaaaagtactactaacaaagaattggtaggacaaaaactagtcctaaatgatacatggttcatatatatagtaccatttccgtatcataataattgtaattgtagattgtttagcatatattaagatttgagaagaaaactataatgtctctcattaaatgacatattacgtgagagtaggaaagtaactaagggtagaatatataggataaaaatttaaatgaggagtgattgatagaacagttaatactctgtagcgacaattattttaagacaaattctaaatactataaatacaattcatttgggatggagtagtatatgatttttttacacatgctacagtaagaaatcttctcatggtcatggcatgggacgcaaaaagaaaaaaggaaaaaaaagaatctgatcaaccttttgttggcatttttatatttgtgagggtaggagaggtgacagcatgcgatggccgatggagaccatgcgattaactagaaaaatgattttagggagttaggcaccggagcgctcgtggctccgatcgtcgcccgttaaaagattcccatggtgtggggtcatgatcatgagagatgagcttgtgtggactacaatccttagctaattaatcaccgttaatcagaggctttaatacgctaataaagcgtaatttgtgtgtgtgtgtgtgtttaattagacacgtacatctgcagagacgacgtcgacgacgagctagtaacgtctgggagctggatcagatcatggcgtgtcgcgtgatcatagggtttggtttttggaggacagggagaccactagaccagctgacgtggttcctttctttgcggttcatatacgcaacaacgcctcccaggacccaggtggctttggcttttgtttctactctctttaaaaaccaatgtattagatgtgatgttttagagcaaggctaataatacagccgacctgttgactataaggttctttatagccttctcttagcctactcatataaatagttagctctttacaattgatacatggcccacttgtctctctcacagagtttttttttgttcttgtgtctaagccggttattagtttacagcccgtttctcctctctcctctcttctctcctatatctcagcatttagctggcttatagcctactattatacttgctcttatagtccaacgaatctaaacagactcattggactataaaacatcccatcgaatactaagttgtttttttggacggagtgagtactcactaaacataaaagataaaacacgaaaaaaatcattagcatacggagggagtactcactaaacataaaagataaaacacgaaaaaaatcattagcatatatgattaattgagttttaattattatactcttaacgaataattttatctttcgttttaaaacaacttaaattcatattttatatatatatatatatatatatatatatatatatatatatatatatatatatatatatatatatataaagttttcatacagaatgtaatgtttaataatttaaaaagcatgcaatgaaaatcgaggtaagccatgtatcttgatcaagttaaaacatatgcctaggtgaggtaatactaagccttgtttaagctctaggtagcagcagattagtggtctaaaaacatgatatttactctagaatttgtatagaacgattaatcgatatgttattaatgtaactgtgtacatcctgatatgtggatttatgtctaatttctgaaaatatataattcaatcaaacttttttcttaaaaaaaataaaacccatctagatgcataattgtcggtgacatgggaccgggagtatcatgacttagagacttgaggcagacacgatcacccacgtggcctaaccccctcgggggggtcgggcccgagggtgatacggccgcccttctctttgtctccccgaggggtcggaccgctcccgtctcggccccgagggccgaggcgccccgaccccttgtgggttttgcgccgcgtatatggggaaggtgagcatagcggggctcacctaaccacatttattgcggtttggacgagcgcgtcacgccgcatgtaacgcagtgcagcgcactcgtttatccggtctgtgaccagtcacagaccgatcagatcgtgggttaggtggcgacaggcggtctgacgcacgcctcgccccatcccgtcaggatgagagcctccaagcactcgtccctagccggaaccggcgtgttagctcctggagatggcacgttggttccggtcagatatatgccaggcttcatcctaaccattacaggcaagatattgtatgaagaggggcgaacatgcagattgataaactgacgcgtggtggacaagaatgaccgatttgtgaccggtctgacactgatcatgtcgtcagcagacagccatgttcccacgtcgcgcctgcttccggcggaagtggaggtaggtatgggccgtcccatcagaaggtcattcggacggcagccatacaaatctccgtccattaatgaagagaagtcaagttggagggaagagaggatgagtccccacacaaaagaaagagagagagagatggtgcatgtggtatccccttgagatataaaaggaggaccttgcccacttagaggaaaagaaggaggagaaaacgatcccggaacgatcgggggctggctcgcactttgtaacttcttcatacacagatccaccaaaacacaggagtagggtattacgcttctcagcggcccgaacctgtatacatcgcccgtgtcttgtgttttttccattctcgcgaaccttccacacacagactaggagcttagaatctcacccagggccctcggccgaaccggcaaaggggggcctgcgcggtctcccggtgaggagccccacgctccgtcatctggcgcgccaggtagggggttctgcgtgtgttcttctaagctctcgcactctttcgtgtgcgccaagcttttcctgttcagcccaatggctgaacaagcaaaggcgcacaacctctctccgagtgttagcggtgacgacggggagccaaacccacgccgtcgagctcgtactccaccgccccctccacgccaaagtcctaggcgggaggaggcgctcgagagggtcgaaggatctgcgacttcgacatccacgggtgatggggaagtgcggcgagatggggagcgtcgtctcctcgtctacggcgacggcagcacgccccagggcgcgctccaagctgcgggcgcgctcctacgtcacccgcccattgtccctgacccggagtctccagcccaacgttggctggacgacgtggccaacttggtcatgacggcacggcagcgcctaggtgctggtgggcggtcctccgccaccaagacctctggcgctgctaccaccggctccgtgtcgtcaaggcggagggcgcggcgagcggcggctgttgctcgccattcggccgccactccttcgtcagcgcctccgacccaggaagatctgcgtggggggccggatgcccgcatcagtatcgagcgccggcgtaatggccgacgtgctgcccacgcaacggagggcgcctcctcgtccggagtgtcacatcaacacggacgcggggatcagccctccgtgcccccggttggtggtgtcggctgtagagcctttgtggcgagccttcggaacgtccgttggcccccaaggttccggcccaccatcgccgaaaaatatgacgggagcgtcaaccccgccgagtttctccaggtctacacgaccgggatcgaggccgccgggggtgacgacagggtcatggcgaatttctttcccatggccctgaagggacaggcacggggttggctaatgaacttgccacccgcgtccgtccactcttgggaggatttgtgccaacagttcaccatgaactttcaaggcacatatccgcgcccaggtgaagaagcggacttacatgcagtccagcgaagggatgatgagtcacttcgctcatacattcagcggttctgtcaagtccgcaacaccataccatgcatccctgcacacgcggtgatctacgcgttcagggggggtgtgcggcacaaccgcatgctcgaaaagatcgcctccaaagagccccagactaccgcggagctttttcagctcgcggaccgagtggctcgcaaggaggaggcctggacttggaacccctccggttccggtgtggcagcttcggccgcccccgggtccgccgctcggtcagggcggcgggacaggaggaggaagaagaggtcggcccattccgacgacgagggtcatgtcctcgccgtcgaaggcatttcgctggccacccgaaagaggaggcctgcgagcgacaaaaagaaggaagccgacgctccctgacctcggctacttggaagagcgaaggtggcgcgcggcccttcgagccgcgcgctaccagcagagcctgcggcgctaccatcagcgccacgtccgggcccgatcactctgcgtcgacgacctcgtcctacgccgtgtccaaacgcgtgctggactgagcaaactctcaccaatgtgggagggtccgtatcgagtgatcggcgtcccccggccgggcttcgtttggctggccacgggcgacggcacagagctgcctaacccgtggaacatcgaacaccttcgtcgcttctacccctagtgggggtcgggtgtcaggtcttgggctcgggccaaccccgcaccccccggggcgtgcagggttggccgggggcttatcttttttctcttccgtatttcaataaaagcattttcgatttcctaaaggctgtgtctgtgcttttgtttccttttgaagaatcttgacttgaaataggtcacttgtgctcaatcctaccctcgggggctcgggtcggctaaaatcgccaaaaggggcccagaaccgagccgtgccccgggacgtggtgaactccgggggggaatcggcaaaaacccacaatcgggtcacccataaccctcggtcaccacgctcccggcctggccagtctcgacatgtggatctccccaggcactagccttgacccgcgccgtttgaggctgggacctgggcacgagcccttgttcaagccaagacacagaaggaccgtggcacagaccatcctcgtctcatacacagaacaaatgaaattgacacaaaaatttcctctttatttgattgcagattaaatcagcctataacaagaagggggcccgaaggcctcggaagaagaaggaaaagctattaagattggcggaggcctgggggctcactccgacgtgcccgggtagccggcctcgccgtcgctgtcgtccgcaccgtcgtcaccgcactccttgtcggagttaaaggcaaacgcgaagccgaggggccgctcattattgtcggtcggttttcccttgctgatgcgcgcgatttgcgaccgccgggattctgcccgaagagagagagagcagggaggagaggcccccgagccgaacggcggcccaaggcccccgacggccggagctggccctccgcctgcttgtccgacggtgccaggcgcccacgacccccaggatggccccgaggccactgcgggaaggccgcgcctgtcgccctctgaccccgaggtcgtcggcacagaagccgagtgcgccccgcgtggcctctcggatggagagcgccctggagatgtggcccctgacgaagaagatcggccccgccgaaaggtgcagcggcccgtctacttcgttagcgaggccctccgggacgctgagacccgataccttcaggcccagaagatgctttacgctatcctgataacttcgaggaagttgcgccattatttccaggcgcatcgggtcacggtggttacgtcttatcccctcggccaaatcttgtataaccgagagggtactggacgggtggtgaaatgggcaatcgaactctctgaattcgatttgcgctttgaaccaagccacgcgatcaagagccaggccctcgccgactttgtggtggagtggaccccagctcccgagctcgtctctgtccccgaggccagctcgagctcatcgcagctgcctcacaccgccctctgggtgatgtagttcaacggcacctgtaggaaccggccccacctgtcaccaggccttagaagtggcgtcacgcccgaccgcttccctcggggagggcgatcgccctggcataacgccgggggctactgtcggtgacatgggaccgggagtatcatgacttagagacttgaggcagacacgatcacccacgtggcctaaccccctcgggggggtcaggcccgagggtgatacggccgcccttctctttgtctccccgaggggtcggaccgctcccgtctcggccccgagggccgaggcgccccgaccccttatgggttttgcgccgcgtatatggggaaggtgagcatagcggggctcacctaaccacatttattgcggtttggacgagcgcgtcacgccgcatgtaacgcagtgcagcgcactcgtttatccggtctgtgaccagtcacagaccgatcagatcgtgggttaggtggcgacaggcggtctgacgcacgcctcgccccatcccgtcaggatgagagcctccaagcactcgtccctagccggaaccggcgtgttagctcctggagatggcacgttggttccggtcagatatatgccaggcttcatcctaaccattacaggcaagatattgtatgaagaggggcgaacatgcagattgataaactgacgcgtggtggacaagaatgaccgatttgtgaccggtctgacactgatcatgtcgtcagcagacagccatgttcccacgtcgcgcctgcttccgacggaagtggaggtaggtatgggccgtcccatcagaaggtcattcggacggcagccatacaaatctccgtccattaatgaagagaagtcaagttggagggaagagaggatgagtccccacacaaaagaaagagagagagagatggtgcatgtggtatccccttgagatataaaaggaggaccttgcccacttagaggaaaagaaggaggagaaaacgatcccggaacgatcgggggctggctcgcactttgtaacttcttcatacacagatccaccaaaacacaggagtagggtattacgcttctcagcggcccgaacctgtatacatcgcccgtgtcttgtgttttttccattctcgcgaaccttccacacacagactaggagcttagaatctcacctagggcccccggccgaaccggcaaaggggggcctgcgcggtctcccggtgaggagccccacgctccgtcaataatactatgatatgtctcatctacttctaatttattatattttggaatggaaggagtatataagcggggaaaagtatagtaggagtaacttgatggatgattgtcaccgtaccagacataaattagtttgttgcctctttttgttattaaaatcccatttgctaatactagtaaaaagaaagtccgattttggttagtcgttttttaaccctggctccgatcgcatccacggtagtagctgctgctgctgcgtacgtgcagctatctcatccaacaacagaaagaagggaaaaaaaaaacgcgcacgtccccggtcggttcggtcgactgtgtatggacggccgcaaccgcacgcacacactcaccgtgtcgaacacagcagcagctggtggctttgtagccctaggtcccgtaaaaaactaatctagaaccgaatataacatatattttagtactacgaatctagatacttccttcatcttataaaaaaccaatatagtattggatgtgacacatcctagtactaataaatgaccagctaaaatatgtcacatccagtactagattcgctgtataagaatatgtcacatccaggactagactcgtttttttatagagagagtatgtttctatatataaagattgataatactagaatgtgtcatatttcgatattattggtttaaagcattactggagttacaatatataatatgttatattcggtattaggtttggttttttatgcaacagagtgagtatctggctccctacccgatcgagcacgtcacgcaaaccgaccccgatccgtccgtccgtccattcatccatcgtactccctccgtcccaggatataagaagttttagagttggacactgttattaagaaaataggtaaaagtgagggccccattgattcaaaggaaattcataggtattttagagaatttcattcctatagtaatttttcttatatagccctttgaatcaaaggaatggatcctatgaaatcctatgaaattcctatgaaatgactcttcccatgtaagttttggaggaaatttaacatgaggtagaacctcatgaaaagaatcctttgagtctttatctctcctcaaattcctgtatttttcctgtggcccaattaaacagtcattcctatgtttttcctgtgttttgcaatcatctgttttacacttgcattcctatcagaatcctatgtttttcctattcctctgttttttcattcctatgattcaaagaggccctgaatggtgaagggttgtgattggatgagtaatggagatagttgggaaaagtgaatgacatagggttgtgattggttggaaagagaatgctggtggagaagttactcccctcgtttcacaatgtaagtcattttagtattttccacatttatattgatgttatatgtctaagaaatattagaatgacttatattgtgaaacggaggaagtattatgggataaatcctaaagactaaaagttgttatattttggaacggatgcagcagtagtatatacttttttttgagaacagcagtagtatggtacttacgtgcagccttgcgtatcagtcactcgatcgatccgacgagggcgagacggagcagatggatggatggatggggttcgccaggtggaggccggctttgctgtcgccagttccacggcctgcaggcgcgtcggatgggagtcagtccccaccctatgcctaggcgagtagagtaggccacctgcccctggccgtacatatgtcccgttcaggaaggcggtgcggtggtgggtactgtacgtgttcttgggaccgagataagagaggctgcgatgcatctgcacctgctcccagcctcccaccaccattcagcggatacttctatcatttttggcgaattctgtttctgtcatcacgctggagctatgatgatcgcttcttctgaaaggaattagcgtttttctttactccctcgttacgaaggctttcacggtgcacggagttattatttagcacgaaccgactatctcagatattcggctccatgttatctggtctattttgttgcccccacaaagaaccgggagccaaattaagctacaggttcctcgtcataatttacaaatataggctcatactctctgtcccatatcactagggaagggatagagaggactggcaggaggagaggccctcgtcatcatacccgtgcttcacgccgatgggcttgtcagccaaggaaagagggtgacactgtggccgcgaaagagaagggatgaggggggaggggggtgagtagcatcactgccattcttgtcctcgttgtcccttgaggtggtgtcgaacgtcgcgtcgagaggaaagggggtaaggtggtgtcggatcctatgagcagctgacgctacccaaggccggatccgatgagccccaagtcggattcggcgagcatagcagcaccgtcatctcccgcggcggccaccccgacaaggagaggtagtgctccacccggcgccgtcatcgctctgctcggcacggtcgccaaatccgcccccaagcacattgttcccttcttctatgcttggctagatctggtcactccgcccgacacctcgctttcttcgcccagcacctcagcttcctccgccgatggagaaagacagagaggagagagggggatgaaaagtgggagaggagttattggtgggacccactacaaatacaatgagtgtgtatccttagaggggcttgggcctaggtggcaaccgaggcccaacaagtgcaataccttcactcctatcgccctaagtttgttttgacttatgtaagatttacaaatttgccgttggtttttttaatttgaaatatgccagtatgccacttgaacgatagttctggtggtatttttataattttttagtgacattcttgcaataacgattcaaactagtggtaaatttacaattgcccctaaaaaaaattatgttgcaattgcttactcttgtactcgcgatccgagtgccaaagctaaatgcagaaaacaaacaattctaaaagtaagttctagtacaatttagaatttactacagtttataaacaactgctcaaaccaaaaaggttctcaatttttttgtgtacagttcagttttttttttttttggagaacaccttggctagagcttggatccgacccaaaaaggttcacttccgtaagctggatcggacaaccgtgcttagcttctccaccaccaagttcttggcaatttaatcgtggtgccataggcctgataatgatttcatcaacaactagctacatgaattgatggatacttttggtattaatcgcttgagaaaaccccatcttcggtcttccggtcgatcataaacacatcagataggcgtatggttcacatgttggtggtttctttaaggcttcgattagtgcacgcggaattttctctagaaggaacaccagaaggaaacatccgctttcactggatctggatgtgaatttttctcaagattttccggtaggcatcatgctcctccgaattcccttgaagttttcattgttcgctccaataaccgctcatttttttgttaaaattctacaaattggcatgcttcttttcttctttcacctttgcgaattgcgatgaatacatgccacctagcgtatttctagcgtgccggcacccggcagtcaaaacgaagacgtgcggtcaaaaacgtactccctccgtgtgcatacatgattttccgcacccaactttaaccgattttccgcacccaactttaaccgttcgtcttgtttgaattttttttaaaaaaaaattaaaaacataagtcaagagtaaagtaatttttatgttttattatctcagcaacaaaaatgctaattataaaaaaaatttcaaataaaacggtcgattaaagttggacgcaaaaactcatagttgcgcttattttaggacggaggtagcaagagaagctctgcaaaatgccaaacccggctgttctgataggacgggcccacacgacccggaaaaccgagaccagccacaaaaacgggagatgccatccatccgtccttccggttcgatgcatcgggtcaccttcctccagcaacaagccaacaacgacaagtctcgacgagattcatgcacgatgaagtcacgcgtgcgatgagaaaaccgcacgcgtgtctgtagcatggcaaaaccagggatgcgccacttgtgccgctgcgacttgaagctcactcgcatagtacattcggttacttccatgttgctttcaggccaaagagagtacacgtttggttcaaattcaacccgttataacttgggagttgcttcctgcgatgtcacgcatgatctgcccgccatgattctgcaggatcagtaaagatcccactattcagcaaccaactgcaattggcaaggcaaagatatgcatgagtgtgacagtgagatgagagctaatatgaaccactacaattctaattctgttcaggttaagaaaagaaaaccggggagacccaaaaccattcatgaaacctgcacatctgatctgcatttcatcggtcaggaatgcagttgatctcactgatatttggtaataactatataaactatggagtcttcacagctgaaagaaaataaaaaatcatcgatgaaataaaagttcaatgtaccatggatcatcatatcaacggcaaccacaggacagtgcggttgatccattgatgtggaccagctaacctatataaccatccttacacagatggaccactacaagattgaggccttggcaatggtaatagacactcgtttatccgagtgacatttgtgggggagaaagcgagaggggctaaggcacttggcagaggagagagccccctgctacggcaactcttgccagcctcataatatcggtactgtgcaacttggcaccacccacatggcaatatggcacggcaaaactgctttctgaaaccaggtgcaggttccctagctcaatgtgcctgtgcaaggcaactaaccttcttgtggccgggcacctgtgtacgtgtcactgtcctaaatggggagttctgcaaattgcaattcctatggttctaaataagtagaggttttaatgatttgatgagtgcatctacttatctagatttttttccccttcaaaacagtaggcatcccagaaaagtaggtgaaagcaacaaagtataggagcgcattactccaatcaaagcagatgatcatgttatactctagaaaaaaaaggcaaatatttttttttagtcggcaagaagttatccaaaagcataggtgggatctatgcttccagtgttgacacagtaaagttttctctgttccaaaaggtgaaaaaggatacaaaacgtttctaactcaagcacatacggaagcaagtgaaatagtagatggttggagctatcagtactagctttgaaagaagagcaaatttcagcatgcaaaacatcctacagtactgtttctcttgtataaccaaattattccgcatagagtgctaatctaacactacaaaagcaaatttaatgttactacagactgccagtcacagaacagacaaggtagtaatcagctgctgtttaccatctactccctccatcccattttaagtgcaactataagttttcgtgcccaactttgatcatccgtcttatttgaactttttttataattagtatttttcttgttatgagatgataaaacatgaatagtactttatgcgtaacttatgcttttaaatttttcaaaaaaaaaatcaaataagacggacgattaaagttgggcacggaaaatcatggctacacttaaaatgggacggagggagtatcttttaagcaatatatttccacccgtttgtctctattactagcactcaccacttaagggtaaccaaaaccataaacccataatccattcaaatactatatggtaatactacctccgtttcagcttataagactttctagcattacttacattcatatagatgctaatgaatctagacacacacatacatatagatttattaacatatatatgaatgtgggcaatgatagaaagtattataaaggaaagacaatagaaaatatgagtaaatcgaacacatgagacatacctaaatgagatccttttccctgcaggaggagaatgtgcatgtccagtttcacagaagaaagcatatgaatgtcgagagggttcatccgcctctgaacaacacctctacaccagtatactttctaaaatcacaaaaaccacatggagttaatcaaacaaaataaacgatttctgaacgagctttgagagagatacagcaatcagatatgctaacaccatatgaacatcgctaattttaatgtaataaaataatcaaaattagaatggattataagatatacatgcaatttgataatgtctaggaagtacaggaatctacttggcccataatgagaaggcccatgttcccctggctgtaccactaccacctttcaacaggtaaatgcggctccagaatcaacatgtacactaaaggacaatgctgtccattataaatactgaaaggatgctccacagaaatgattgtgtttcctctgaatatttttgatagctgcgagagctggcttcctagatgtacggccccaccttgatctcttcgttactctgattcctcactggtaacacttataatcctagctaggtcttggacaatctctgacattgatggtctgaattctggttccggctgcataagaaatttcagatcattcatcaatcacatgatttttaaatccatctcatatggctgttctcagaaaagaaaaacaacacaagcagagcagagcatagtgaacagataaacaagtatattacctgaatgtgatttaagtatcaaaatgactaaacaaattaatttgtgatataataacttggatataaaattgcagaatgcatttgacctcaataatgaagtaaaattatgcaatgggctaataggaaatttagatagttgatgcttttagcctaattaaacagctctctatagaaaattctggcataaaatcctgatagagatgcttaaggaagtgacacatgtactatcttatattatgctagaaactagaaactacagtttagctcaaaagataatggaagtatttgattacccgaatacaacggctgatgatgtctgcaaaacgtgacagtactttctcagaacactctccttgaatagaaggatcaaccatctttgatatggactcaatgtcatgaaattgagaatcagcccatctaacaagatgttgttcagcacgaggacgagaactgcatattgtaacggaaaataagcaagcaaactagaaagttcagacaacatttggagacaattgatctaacacaattatgaaactaaaattaagaaatgcatattacggtgaatcactgacctgtcatatggtttacggccagtgagaagttctagcattaccacgccaaaactgtaaacatcacttcggtaggtaaaagtcccagcttcatggatttcaggagcttcataattcagcagtgccctcatgcgacctgacaactggaataaaagaacaccattctaagttaaaaccacagagaggacatccttgcagcaatggcttcattaggagatgcaatggggcaaccagaccagagatgtgaacgaacttgcttgtttctttgcttgcttaactgatatttgttaaagcccttaaatgaaccagctcctaaaaacatcagctaaaagcttcttaactgaaaataatcctaaccaaaagacaacaccttatgaacaaatcgagggaacaaccatcaatttcaggcctgaggcgagttctactgctgtggtggatgtgcatggtaggctggtagctggaaggcccaacataactaatctaaaacttaagataaataaaattttaacccccttctttcaatagtctttcctgcgatagtaaatatgtggataaggctgctctagtttggaaggaagttgtagcactggacctagtagctgtcatgccctgagagctgcttaggtgcttgaatactggattgttactcgtatgcagtcaaattataaagagtagtattcacaacactacagatagtcaggtactttaattaaattatcacaaaactacatatttaaggtgttgtatcacaaaactacagatttaagtatttaacacacggtttatcacaaaactacagatttaaggccaaatatcacaaaactacagctttaatactagagttatcacgaaactacatattttacaatttaaatccctaccactactatcatgttaagagttataaatgttatagttttgtacttcctccgtttcatattataagactttctaacattgcccacattcatatatatgttaatgaatctagacatatatgtgtgcctagattcattaacatctatatgaatatgggtaatgctaaaaagtcttataacctgaaacggaggtagtacttaacttgctacaaaacatgtagtttgtgatattttattactaaatatgtagtttggtggtcttccatcttaaatctctagttctttgataaattcggtcctaaatctgtagttttgtgatgcaccgccttaaatctatagttttgtgatagtttgatcaaagtatatgtagttttctgaaatttactcttcttaattggacttcaggaattttaggaaatgtatcagaactgcttgcgacggaaaagccgaagtatcacaaccacaaggttggtgtacaacactagatgttacctgtgtaacagaacctgacagcgtcaattctgccagtccacattcagcgacacgtactgagaatccattaccaaggagcacattggctggctcaaaattctggtgcactactggaggttcacagctctcatgtagatagctgaaagaagaatataagtacaaaagctaccccatgaaaaactaaattaaataagcacaagttcatggtaattatattgaaccgcgatacagcttggtaacttactctaaggcctttgctgcaccaagagcaacttggaggcgagcattccatgatagtgcaccatccaattcctccccttcatgtagtacatcatgcagtgtttttctactgaaatgattataaacaagtaacctctgaccatattctgcacagtatccaacaagctcgaggatgttgggatgcctaatatctgatacacttgcaaccagttctagaaattcatctaccggtattctatcattggcgttatcaatcttcataacttccaagaactgcataggataaaggaagattagtatagcatttcaataatcataaaattccatttaaatgaagcagtattttgtaaacataccctgccttcaggaagttctgccagatatacttttcccaacctactctctcttatcaaatttccctcttcaaaactatttgtatattgctgaagtgatgcaacagaaaaggatgttgcagatgtcgagggacctgtcctaggtggagtactaactcttttctctggcttaacaatgggatttacaatcactttttcaacaggtggtggtggtggcggcggcggcggcggccgcggcggtggcggtggtggtgtcggaggaggaggaggaggtggtggtggtggaggcggcggcggcggaggtgtagaagcaaaaatttctgtttctgatcgctgcaagttaattacatgttcttttctcttttcaggaggcttctcgagagcagctgccagcaattgaatagttattttatacatctgaacttaaaaatgtgaatagtattacagtactaaaagacctgatagatcagatttacaagcatctatacctggtaccgccaaatttatttcacgaacctgcctccgttcaggaacctctgttgatcctgttaatagaacatcaatatgctgtgatataaaacaaataaaatataatcagaaatatattacagaatatataaattaattgttgaccttttttggcatcattccttgactgcactgaagcttgcttaactttcggctcttcaaccctctgatgaaccctccccacctgacttgttgtataatcacgtcttgactgtctctcttggtacttggacaggcaaaatattaccagcagcactgtaactataaacaggacaatagctagaagaacatatccaacaatcctgagggttgaagacttatgtttcctagatgatggagagctgctgtctcgagcagtagatccaccagaagaattagagggcgaactagatggcgaaggagttccagaagatgaaggtgacgatggtgtttgtgttggtgtagagcctgtaggtgttgaagagggtgatgcagaaggagctatgctggtattaaatgggttcccatcctttctgtagacaaaaacaatgaattactcaataagttaccttacatataattacatatggcaaaagtatatagtagagagaatttttatgtaggaataccaagtactatgtgaattgcatcaataaatttgaaatatgtaagaaaaaggattctcacttgaagtttggcacattcagcaactttggaggaaccggtccagaaaacaaattattctctatatttctgtttcaggtaaatatattatcagaaacaagtgtagatatttcatatttgtatgcataacagcattctaagaaaaaggatgatctggattagacatacataacaaattggatttaaattactgtttgacttgtgaatgtctatgataagataaaagctaaatcacttacatcacctgttcttttttctaactagtacagctttgttaaaacctaaaagtcccggttctggtcatgactacatggtacattatacttctgcaaacaaatgtatgactgccatgtactttgtgaaaggatgtcaagtttctacaaccttatcaaattcaatgtgactgttgaataatagagaactttgtgtctgctaacatattgttgcatgttacttcaaaataatgacaaagtgcaggataatcataatttatactatgacatctctaaagtagaccagaagaaaatgtctgttaagcagatcaattttataaatcaacacataactgagaatacaattgctgattgtccaatttatacataatggtgtactaataaaagtgaatcagtaatatgatgacagaatagagagtgtgggaatacaaatctttgagggggagatcctgcaagacatcaagggttccggatagttggttgtcttgcatgtgcctgtaaaataacaaggcatgaaaataagtaaaaatgatagggaaaaaactatataagaaaatacttgtagacttacaatgtagtcaatgatgacaggcttcccagagaaggtggtaatgaaccactgaagttattggatgaaatatcactgtggtcaaatgctagatgttatgaacgagttaacagttcaccccttgcctgccaaccctctcgggtcttggggaaaatgaagatatgatatactctcaggtgcatgagcaagtgcacatgaagagtaagaataagcaaaatgaaaaggagaggaaaatgaggtatcttacaaatttacaaggccagtaagggaaccaaaagcatctggcagtttcccgtcgagatgattatcatttagagacctacaaaaagacagatcagaaaaaaaatagtacagcaacctctctgcttaggaacagaaataggacaatagtcatacatgtctgttaaactctgaagcattgatagtgacgtcggaatgcttccagtgagctggttatcagacataaaactgcaccagcaaggaacataaggcatctcatcactcaatcacaagagctaaaaaaattccagaagaggaagaatagcacatacaaatgctgcagtgtaacaggtagatcttctggtatagttccaccaatattgttgttgctaagatttctacaatgaaagaaaagtaaatagtcacaaaacctgaccaggatacatacgaaaacaacataacttctgccaatatataagtacagactttgaatttcctattgatctattaattactatgcatgtataattagatgacatgacgatcaaggatcaatcatgggcaaagagaataaaattaacagtaatactcttacatagtggttattgaagtgaagttccccaggctgcctaactgtccttccaaatttgcagcattgaaaattctacaaacaatgagttgataaaagcacaaaatataaacactcgaccagataaaggaaatgcaaatgtacaatggacgtacattgaatctatatttgagccaatacatacaacgccctgccaaccatcaccacaggggtcaccaccattcgcagtccatttaggaagagccggtgatccaagtgcaacatacagtccatttatagcagcaactgcccataaatcaagcaaaaacagtcattagtaacaaacataattatccctgacatggattcacaccaaatcaacaccattttaaggtacttaatgaaatgaacctacatagtaagtagagtgcagagtgtgcaaatgggccagttaattcaggtaaaacagaacccagcatttcaccaaaaaccaagggtgagagtggaaattagtcatcatatcaccttcagccgactttttacaactaagacccctttttatgcaaacagtttgaaaggaactttttaattaaagattcatgtaagcgagagtaataataagaccatttctcattctaccacaactagcctaactaaatcatccatcactttatccatcaaccattgtcgtcaataatgacgattactaatccaaagagaacagttcacataacaatcctaaaacatcccttcagaccgaaaatagcagctcgattgcagcatttaaccacttcatttgcttccacaagcaaaagcacacgaaaattcaaccgccgcatcaagtccagaagaagaagtaccgcaagatatcccctgccaatccgcacaatcaaattgaatcgatcgacccaacctaaaccccccacacgtttctcaccacccgcccaatctctagtgcacagtacagcactgcatcgaaatcaatccccaccttgacctcgcttccaccgacaaatcccatgttcaccccgaacagtacttagctcgaatcatcgcctccgcaaacagtgcaacgaccaacggccaccaaccaaaagctagtgcaacacgtacgagcaaagcatccaagcacgaagcgcgagcgcggagcacttaccatcggcggcgacggtggccgcgagcgcccgccggggcaatgccgccgcggcgatcagcagcagcagcggcagcacgagcaccgccgcgggagcccctctccggaagcagcacctccctcccgctgccatccgcatcgacgcaaactctctctctctctctcccctccagcaattaatcagcgcggcctccgccgaagcagcatcagccagatcaacccgaagcgatcgcggaagaagaaggaaccaaaccccgcgttcgcagatctagcgttcgctcgctcgcgcgctcgcgagagagagatgccgtgccgtgctccgcaccaccgccgccaccacggggctcgcttcccggagcacgccgccgccgccgccgccgcagaggcttgtgcttttggtgggcttctagtagaatctagctgtaaaactgcagtctccagaggagagagagagagagtgagagagagagagagaggagagagaggagagtgagagtggcggcgaagtgagagaagagaatgcgaggaggaggagcgtgggagtgagcaacgggcgtgaaaaggtagagagagagagggagagggagtgggtgagcggcgagcagcgaggggagaaagagagagagagaagaaaaggcgtttgcgagaaaggagaggagaaaaaatcgagcagaatagcaggggatatttgtacttgtgacttgtgagtacaaaattattcatctttctaaaaagtattattcattagcacataattaattaagtattattcgctccgtcctagtttactagccgttctagaaaggagatgacaaaatatggtattggaaaaataacctacatacccctacattaatcatttcaatgcttaagaattaacacaaaactagtactgcgtctgtcatttcgatatgtctgcaacaagtatagggaagaaaattaatagaagtactcatgctagtggctagcatgctagctgccccacagctaaacgaccttctttctgggaaataactctacaccccagcgacaactaaaccgggactgatagagtagtattaaaaaattaagaaaataaattaatatgatttttgaagtaacttttataaagaaaatttctataaaaatatactatttagtaagcatgtttagtggtttaaaaaacatgtaaaaaaagaaagatagagttaagaaagtgaacaaaggaaccgccatgtgtagtattttctccgtttcataaaaaaataaactagtatcgaatatgacatattttattaatacgaatcgatacttttcggtttcctagtattaggagtacattatttttttttatggaacgcgagtagtgcgagtgttctgcacgctgcgaggcattcagtgcaggggaggggtcgtgtggggcccatgatgacgtgggtctcggctgggctggattgggagggtgtgtggggccagcgctgacgtggagctctcgtggggtgggctcctggattcgtttttcatttggcgttttggctttttgtccctgggaagagttgtttgggcacacgaaaaaggaagagattgcagctttggatgccgttatgtatatccatgtacgtttgcaactttgcattgcacccaaatgtcttgtgcttgttgtgcatgccttcacgaaaggcacttccttttcaaaacttttgaacaaagtagctagaaaaaaagtgtgttgctcaaaggtggtttagatattttgtgttgaggattgatatgaatttgtgatacaaaaggatatacttagcccatcgatccacctgtaactcgaatttatcgaaacatgattctaattttggtagtaacaatttaacaaacatcctacaagagtattataatataattaacctatcactcagtgacgaacacacccattaggcagggtgggtcggccggcccaactacgatctgtgtcgtcccacaccccgaaaccttattttagtcctatttccaacattagtcattagtctactattgaataatcagataaatcaagtattttaagtaggaacaaaaacatttatgaaaattcgtgtataagtaataccattttgatcgtttctgattttggccgtacataaaattctattttctttctatttctttagtgcataatacagtctacagtaaataggtaaatatattaaaaaaatccattttactcacttgaactattttgacgaagcacttaaacccctaaataatttttcatctcgttttatacccccgaactattgaaagtggttccccttgttgtctaacagcatttctcattttcttttatctctctacatataagtcatatacgtttgttcgactaccaatcctcgttgttaactttctcgatgttcgtgccgtgcattgttgcgccaatgccgtgaaccagcgactaagatttgtgtgtgttgtgccatcacctaattagggctagctctaccgtcccatctatattttaaacatgcgtccatcactgctatatcacttgatatcaattaaactccacgagaagaaggagagctatcctcacagaaagaaagagagagggagagaaagaagaactataaagcaaaggaacatgacaggagctaggagacaccgaatttcattgccttagccgtcaagcacctggcaattttccaacaaaccaaagcgtcaaaaacctaataaaaccattgattcgacaatgacatccatgccaagtcacaatcttgtccttcaaaaaaagaggaagcttgaagcacataaaacccatgcttttagtgagagcatcacttggaaggggacaagttaagagcaatccttatccttcaaacctgaggcctgcaaatcaaatggccccacgtcaattagccagccgccatgacagtatatatacttgttgaaagcgcattgggtcaatataatggtgattggagaatgcaatagttaattaatgacagtacttatcacttactcatatatatctcgtgtgtcctgggaagcaaacaaaacaatatttgctatgtcaattaagatctatcattatgttgattattactgccacgagggtgaaaggaagctctctctttcatgttgctcaggttaattttggtttactctctgacagattagtttagtttgaccttaacagatcaattattgtcgaataatacgtaaatacgatagcatgtagtggtgaaaacggatcccatccactttgaatccatccgaaacaaaggatattggtacgggtgtggttaatgggcgatcgatcctctatacactctctctcccccttcctcctccccttcttctcttcctactacaccatataacttttttaaaaaaaaacaaagttagaaaaaattatgtatagaaatactatataaaaaaatatttgaattcaaattcaaatttgaaacgggtacataaacttttgacttataaactttaggtctataaactaatatttgaattcaaattcaaacttaaatcgggtatgtaaacttttgacttataaactttgggtctataaactttaggtgtataatttttagatgtatagaaatactatatataaaaaatatttgaattcaaattcaaatttgaatcggatatataaacttgacttgtaaactttgggtctctaaactttaggtgcataaactttagatgtgaaaacttgatgtgtacaaactttaggtgtataaatttactaaaatagtgaagtaatgcggtgcaaaaaaggaaaccacatggaggagggggtgatcgatgtggggagggggactgatcgcttggagcgatcgatcgccccttaggactttcgtattggtacgggttttaagaaatctaacggatatagttgcaaatacagatagtataatgtggatatggatgcaaacgtggtatctctaaaattcaacggatgtgaattatccgatatatctatcagattatctaataagccgtttgttgaataatccagaattatcaatctatgtaatcactctatccattgcatgtgacatgagccagactatccaatgatctgattcatcaattaacctagattttttagtttggggctttcatcatctcatttcacacttgcattgctgtatttttatattatgtatacattgtatacatattatttagcacttaagtatataattattacgataggtcatttattgatcattttattgttgtcccattgctaactcgatgttatattgattgcaataatgtaacgtccaacagatttaatctgtttctaaattgagtccacaccatttctgacatccgaaaaaatctgccttatatccatatccgctaaaaatatacttaaccgtcccataaaaaaccaacctagtactggatgtgacacatccagatttattgtactagaatattgtactagaatatgtcacatctagttctagatttatttttctgggacggatggagtatggttcaagatatagtatacctatatcttatccgttttcatccctaatagaatcatagtatgccggcgttaattgctgggttcattcaaagagatctttcggtgcatcatgggaagttgggtataccgaactaagctaagtgcatttaaacaggatggacaaacaaaaacagacgagatcaactttagccacaaggatcagagggaatgcttagcatcaccaccaagttgtcatgatgatttcaacgattcgtcccgtcatgggcctgctgctgacgtcactatcctaacctaacacgtcagactaccaaaacgggtcaatgattaacgagaattcgatccattgattcattatcgtaccaccaagagaaacgattacaccctcctaattatataatcattatctgaccgggaatgaaaatggtcatacacgatgtcatatctagtgatttttttcatatttatcaatttatttatttagcggtgatattaatatgattctaacagaaacttaaaaaatcaaaattttataggactataataaaattcagtcgaaaacggtacgaccagttatataaatgatactcgatcaccggaaatttacatcaccgtatgtccgtttgtacttctagtagagaccaccggaaaagcactcctgataattcaggagtatagcagtttatgtagctagtagaaagattctagtcaagctaaacaatggaaaagggggtgtaaaaggtgagaacaaaaggaggaaaaaggccggcataaaacagaagagaacctactctcctttcggctacttgactttctaggaccagataattcttggatagctactttgtatcctagaggatactatagcatttattatgtagtactccattcattccaaaataaaccaacatcttataagatgtggcacatcctgatacaatgaatctggacataatcatacaagatgtgtcgtattcggtacgagattgatttatttaactgcccactgaaatggaggttcataaaatccgagttggcaaaagtaatcgtataaaaaaaaattactgtgaaagtagatcagtcatctgaaccaaaggagttgcaatgtacaaattgctaaatgaaattctacattttttacagaagttgtatgataagttcaccggaccatagctcattattatcctgaagaactgaacaactgaagtggccaagttcaggaatttttccctagacaaattccattggatgggccttagcttagacagattccattggatgggcccagctacgaatttttcgtatacgcaacaattttttttagctcaattatacacaattgagataggatgtgaatagcatactagctagctaggcccacaaccactagttgttcagcaagcaatatcatcaaacaatgtctgtaaatctgtaaataactctcatgtggtacaaaattaactccaaagtgtaaattatgtactccctccgtttcaggttataaaacgttttaactttggtcaaagtcaaactattttaaaacgtttggttaaagtcaaactattttaagtttgactaattttatagaaaaagtagtaatatttttaacccaagacaaatatattataaaaaattattcaattatagatttaatgaaactatgctggtgttgtaaatattactattttttttctatagagttagttaaatttatagtagtttgactttgactaaagccaaaacatcttataatctgaaacggagggagtaactgaaaagtaatctgccaagcaggtgaagaaagggagcatctatgatgctcaattgttgatcacgtatagaagtcattagaagaatgaattcagtcatttgctgaccatgcatcagacctaaaattcaaccgtacagtacagatctctcctcgctcccctaactgtaaaacctcttctacttgactacttcccaaattttctctaatttcaatatcgttttcttttctgaactgccaatttcaatctctttagtgaagttcaaatattccgatggcctttttctttaaaaaaaacctgtttctgaacggcttcgaatattccgactgaagagcaaatccgatgattttttttccttcccaatcctatcaaataaattacgaataatttcttcctccacctatcttatagtactgcagttagtaattctccatacacaacattggtagtaccccatccgttttagattataagtcattttaactttagtgaaaatcaaacaactttatgtttgactaagtttatagacaaatataatattatttatttacaacatcaaattagtttcattaaatcaataatcgaatatgttttcataatatgtttgtcttggattaaaaaatattttttctataaacctgatcaaacttgatataatttgaatttaaccaaaagtcaaaaacaacttgtaatcagaaacgcaggagtatagatcacaaactgccagtgttacaaatttatcacaaattcgagcagttccatgcacgttgttagttacacgtatccctcttgcgtttcgcgccaagcgtgccaagaagatcacgcctgaccaccgcccgagaagcggcgccgtcgttcgacgtctccggcgccgccgccgccgccgggaagaaagcgccgtcgtcgtcgacggctgcggctacctcctcctcttccttaacgactgcatcgtgatgatgcgggccactgctaggcgcatcgcaacagtagccgccgccggccgccggcttgtactccggcggcgcgccgtcgccgtcgccgtcgccatccagggcggcgccgccgcgccgccgcgccagcttggcctcccagcgagcgcggaccgccgcgaggacgccggccagctcaacgccgtcgccgacgccctgggcgacgaggtcgccgtggacctcgccgacgacgtggtccatgacggcggtgtacaccgcggcgacgtcgtcgctgtccttcttcttagccatggcggcgatcgacgcgcgtacgtatgtgtacgtatatatacgcccctgtagagagtatttatacctcgagatataccgttatattatgctagtaaatcgtattcggatgggataacgatttttacgcgtacgtgaaacgtgataatcacgtatactacgtttttacacaaaaataaataataaataaatatacaaataatcagtatccaaccaatttgttgttgggcttgggcctcggcccaggaagagacagatttgcacgggacacgtgtcatactcttataggctggacatcgaggaaggcgtctataaaacacggggcgcttcagaaccctaaacccatcagtcccacctgtctctcgccgccgccgcagcacaagcgcattcagatctcggtcgcttggttttccttcttgatttcctctccgagtggtaattgcttccgtgtttttctctcttttttttttctcgttgaacgattgatttgcttttgcttccattttgtttgtttgaagatttcaattcatcgcatcgttgatatagtttttgaatcgtgtttgggatgcaaatgatttggtggtgagaataatagggctctatattatgagtcaacagcaggcgccgtttcaatggtgccctgtctgccgcttggagcccagatcgatgcctaagccaggagaagattgtttggagatccatcttctttagttccaagccacaatacctggccacaaacccaaatcatcccccaatcgaaaacatcgccttcttttcttcagttcttgctgtttttttgtatggtgatttgtatgttttggacggctctcagacgaacgggtgctctgccgatctattccatgggcgagccaccctttgcagaagtgccgagagagacgcaggccgctaacacgattgggtgtttcctttctagatccatccaaatttcaagcggaaatattgtatctgtatcccatagatctgtccggtttttcattaattcgctcgctttggtgtttcaatcgattgcttgtttttgctgtcagtcactgcggatcgaaaaaacttgtgcaactgagggactaatctaggcggatgatttctgtaaaactctaatggacaatgggtactccatataaaatatgcccatcttaaaaatatttcttgttgatcggatggacacttagggagttagggtgcgttcgttccatggacaatgatgagtgagatagcacatcgatgcgttttttgcaatttttttttaaaaaatcatattaatctatttttacactttaaagtagttaatacttaattaatcatattctaatagcttatcttttttttgcatatctttccaatcttctcgatattcgaactcacccttagcatggacgagtactgtacacggctccatagttcatcaagcgaatgaaacaattctttattctcgcgttaaaccattattaaagttcaaacttgaaatctgtaagttcgttaaaaaaactgaaatctctaagcgttaaccctattttctattttcgtaatagtagtaactaaagcaaggcattgtttagatcgtctttcacctgccattgtctgttgatttgaggttgtcctgccacttttctgtgtcaacattactcggatcattctacggtttcatttgtggatttgagattatcagagatcgacacaagagaagaatccactgaattccaaagacgagtaaggtgcaactttttgcagtaaaacacatcaggcacaacagaccacagttccagaacagcagttgacagatacaaaacaactgaaggtaaatcaacagtaaaatgagcgaaacaccaaagctaacggaacgtttattcacacaatggtgttcttatctgataaggggaccaaactgtcatgacagtgcggtaacttcagttatcttaacacaaacagcagacagcatgagagcaacacaacatcataaagttcttatcagacatgtgtcatagtaacccaacataatcacacaatggacaacctttcagctcaccacaccataatgatacattatgggagtagcattttatatgtacatgtctagaagttcatcctacaaaggggggcagcagaagaagaaatagacaagatgaaaatgagaaatggtgttcgccattggacgtgatgagatgaaccaagtcggcgtatgatacacctctttctttagatcggcgggatgttcgaaaacgagaagcccttgtaccctttgtaagcatagtaggcaattcttgtgtagtagaacccagggatgaacatcacaatacccagaatcatgaagaagattcctgttccaacaaaagggaaatggcttcaggtaaagaaagaataaagtttcaacagcaaaggttctatcttctatgcaaggggaaccctacctattgtatgctaaacaaatgttatgttaccaaacataaaacttgatgactgaatcactttgtgcccacccacttaaaaatgttaaaagtttttttagcctataaagttgtcaaactagagaacccattcgaatcttaaacactactccagcagtcaagccctgttgcttccagtgattgctatctggagcttttggatataaaatgccagtatattacaaaaacttgatacatgaatgaatgtaattgacaacaaactagtagcattaaaataaatgtatgttctacgaactgtcaccaaattgcaatgcatacataaagtacattatttcccccaattgccacccagctgtagtaaaatgcatgtggttgaccaagtcaaaatcaaatgagaataccagaagtaaattactaataataataaatttcctctgagaaattaccaaaatggatgattgcgcagtcaaacaataacccccttaatttcatcctcacaacccaatgcactgaagccaaaccacaccccccaagctagaatcccgcaagatctctactaccacagcatcaattggggggaaattgtatggaagcccaggccctagacgcgcgaattaagaggagggcgctcaccgtgcgcgcggtcgccgccgacgttgttggcggccatgaggacgccaccgatggcgccgagcgcgccgaacgcgaggagcgcggccgcgaaggcgatctccttgacgggcgcgccgcgggggccccccacggcgccgccgacgaggtcgtcctcgtcggagatggagaaggcgtggtccacgtacgccatagctcccccccaccaccacacctccgctccgccccccggatccgatccgcccgcacctggcgcttgccaacgcggcggctgctacgcctcctcctcgcctcctcgccgccgccgccgccgcgccgagggtttggtcgcgtgggtgtgggtagggttggatggatgtggagagagagagattgatgagagagaaaaagggtgaggaggtggatgcgggtacaagcaaggtggaggagaagacgagaggaggagggcgagaaaacaagcggcggctttggtgttggtggacgtcgtgtgtgtacgggtcaacctgcctggttgggctgtggccagtggatgctgggcctatatttttcggcccatgaaggaatatatttgggccctggttgggctagattgttcggcctacgaggaaaatatttgggcgttgtgttcttttttttctaagttcatttcttggctcctcatgacgttaagtttgaatggtgttcttgaacgacaatatcagttataacgtgctcctcaacttgtaaaactggtgtaattgaggttctagagcagtattgtactagattgtggttaacatggataattgaccatgtttaacctggcggagccaacaacaaaccccacatgtaaacggccggcgctttcctcttcctctcttcccatctcccctctcttttccccatattctccaagggggtgccctgcggtctgcaccaaagacccaatccatggccagttgttgtagtacattgggttgcatacagctaaggcacttggtcggtgccttggcggacttctcggtgaggtcgaaaatgggcatgatggggagtgtcggcgcgaaccatgcaacgaaggtgaagaactcgcacatggggcaccaccaggacgtgctggccggcccactcctccgacgatgtgcagaggtgaatgagaaggtagatggccccgcccatggactccccaaacaagaagcctaacggctttcacgtgctccgcccgtaacttgatgaagcggaagaaggtgagaaggtcggctatcattaaatcgagctcagggacgaacaagcggagccccctagctcctctcccatcggccgatgcccttcttcccgccacgtgctaccctttactgtatcggttgtcgctttggagaagatggggaggataggtgaagagagatggaagaagacttagccactgacatgtgggtcccatgctaactcggctgggttgactgtattcaactcaccatgttagctaaaacctgacaaaatactgtcctaggacctcgagtgatccgattttataagttgaggtaaacgttacatctggtgttacaattcaagcatgtgattcaaactcgacgtcaagataagagacctaatgtgaacttattccttttccttttcaaccatgtctagcatggcctgctatgctagcctgccaggagcagtttggtctgtcacggcaaggctgcaatatagttggtattctgagtatttgctttcgtatttcttttctttagaagatagggaattattaatacaatacatttgcttcaaacatgcatcgtcgtgggagggccctaggcattacaatatttccattatgatgtagccatgtcattaggtggtgcttggacacaataacttgcacacaataagatgtaataaacctaagatacctagaaagtgcatggtttatacttcttatttgtcctaactaaagtacaatgagagcaaagctagctctcaagtgcatgtttgcttcattttctctttgaaaataaaaatgaaaaggtaaaaccagcatcattattattggtgctaggtgtgtaagaatgtagaactagtaaaaggttgatggtgtagtctatagtgggcatgcaagaaaaggaagtaaaaaaagggaggccgcaaagggaaatggctttacttattagccacggcaaaaattgttgctagctagctgccctcttgcatatgcctcttcgcagaaaatgtacaaaaataccatattaattgggtggggggcactcttccgccccataaaaaaaatctggtataagatatgatattgtctgatacattatagtaatattaattataaatctagattagctgtttatctaaattcataatgatatatcgtattatatttgttttttatagaacgagataactatttatctaaattcataggatacatcatgtcttgtattatatttacttttttttatggagagtacatgcgtgcgtgcatacgcgagtgggcgtccaattaatactacgtgtgctgtttgatcaagctgaactgaagcacattaaacctcaactacgcgcccacgtaggccataaatgtgaagacataatgtaggtgatggtcgtctgaactgttgtactccatgttcttacacacatttatagataaaccgtgaaaaagaaaaagacaaagcaatttttattgacaataactttatacctatattaatatcagaaatttaaaagccaattctaaaaaatagaccacaattaaaaaatatatatccaaaaatcaacttcagaaattaagtttcaagtttaaattttatctgtgactgtggttgataaactaccaaatgatgagaggcttagaagataggagaatcaatattttatctttataaaaatatgagaaaagagaatatcgtgttaattccgagacatgaagtttatagctggttgaagattgaacccgagatcttgaggttgaaatcacacattacttaccactgtactatcaagtgcatctctaattaaccttcttatgtgtgcatatgaaactattgagaatatatttgacgacaaactattagccacagtttaattagcaataaaaacttctattaaaaaataaaaatacaccttgcaatttaactaaaacaacttttatataatcatgatcagatggaccatgtggacttaaatggcagcatttttagggacatatatgatggggttggaagcctgccgctcatcttttctgccacccgctagcttattgtccagggagaaatgcagggacagcagcagtactgttagttcaccatggacagtatcattgaatcccctcttgcaaattgcaatggcccggccccacacacacaaaattttcagatctgagtggcattaaccatgcagctttcctccccagatctggagtagtatgttctgccactgctgcatgcctcctctcctctcctctgcatggattgctctctgcctcatgcatatatgcatccctttttaggtatcaaaaggaccagccaggtacaccaaggggggggtcaccctttggaagctctgcacagtgcacactctcctttcccctccagccattacctgctctctatctccctctcaatcagctgaccctgcattccctattagcatctccggacgactgtgtcgatatctcttgatattaacgaagttattacggacgtcccgctgccgacgggtatgtacgtcggttaccactgaaaaaataaatagtcgtaaaagcgagcatccggtcaaatctaggacctgaatccggatggattgattccaccaaaagaaatctaactagttgagttacgctcatttcgcaccatgcatctactagtatttaactaataagcatgcaacattcatgaatttgcagagtgagagaaagggaggtattttagattatttactgaattattaaaaaataataatcaattttcgattttttcagattatttacttcaaattaacttaaaataagcgatctaagcaatagtacacgtttcgaaaaattcgttttctcaaaaaagttatcttctaatacattgccaaggtcatttgtttttaagttatttgttaagttaatttttaaaatatttaaaacattccatatataaaataagtagataatctactagaataatccactcaataacctaaatcaaatggtgtcttagttggctttttttttagtttaagctctaagctagagccacacgcttgggatggagaaattattttttgagaaattgaactaaatccctgtaaaattcccgaaaggaggtctcaaaatgaagtaaggaaagaaataatattgctcaacttttgcacatacagtatatattatgcaatgcaagcacaatattccttgtcaaagtaagtaatggcatgatcaatcgagtgatgagtgatgaccattcaattggtacctgaattagctgaacatccagtcagctagctagctagggggtaatgatataataatgaactacatttacagtttgttattcaaataaccccctgtagtaaaaaaactagattaaagtaagctaattaagctaaactaggagtaattaattactaaactaaaccgtctctcgttgcaagcaaccaacaccactccatggccatgcacgtatgtacgtatagccagagtattttaggccactcgccatggacagcttcaagctcagacgagaccaacaatggtggatacatggatcagcccacgacgtgcacgccgatcttcttgccgtccagcggcggccggcacggcaccggccgccgtgggacgaacaccttggcgagatcgtccggcacggcgacgaacgccgccgccgccggcgccctcccgccgcggcgccgcccgcagcagtagcagctgcggctaaagcgagcgtccttcttcctcctcttggcggctggcctcggcggcttcctcggcgccggcgggcacaccgacggcgcccgcagcacgctcgccgccgccgtcggcgtgctgcacagcaccacctcctcgaactccggcatctccgccgccgccgccgccgccgtggtgcggatcggcgggagctgagcggacagcaggtcgagctcgaggcccatgtgtgtgtcacacaagatcgaagagaagcttagataggaggcaagaagaagcaaggtagggttgctcgagctctacttaagtagctcgccgccatggcgagtgagcgatggaggagggaagcagcggcaatggtggggtaaagaggggtggatggatgcggggagcaggcgtggagaggatggcagtgatgatgatggcaaaggtggcgatccagagagagagagagagttctatggagacagactgcaggcaggtgcaaaaggttagagagagaagagagagggggagctagagatagaggtgatactgatgattgtgagaggaatgaagtggggggctggatgatgatggtgattaagctttgggctttgggggtgatcagatttaagctgtctaggttggagtgtgttaataattaggttttgttagtttagtagtactcagctttaaactaagttggatcttgccttaattaagtcaccaatgtagggtgaatatgtgaaattaagtgtgtgatccagatcatgagtatagtgcatttttgtgagaccatgaaagtttaagggtgtgcttgagaagaggagaaaggaagagcctaatatgtcattttttaaaattgtaaaatggactaatatgattttagaaacaacttttctataatattatactgtttaacagtccgagaagcgtgcaaacggataacaagatatttcttctgcaaacgaatatagcccgattgtccctcgagggatgtcctcttgttttatatatcataaatctaaaaatatttaataagatgaattaatataacatatatcactccacgatcatacatgtttaatttcaactaatacaagttaaaagaaacaataagttcgagtgtcaattgtatgtactagttcatggtaagaccacccgaatcagcagtcgatccaatgtatggcgaccttgagcagttgcccgggttagttggcacggccaaaggacgggaaaattgcattatcagtgtttgacgatcccaacatctagccattttgtgaacgtttttatgctctatgaaatttctaggtccaccatgcctttaggctgtgttctcggccgctgttggctgtgaaacaagtcattagtactccgtttcaggttacaagacgtttcaactttagtcaaagtcaaactactttaagtttaactaaatttatagaaaatagtagtaactttttaacctaagacaaatttattataaaaatatattcaattattcatgtgatgaaactaatttagtattataaatattactatatttgtcagtaaacttaatcaaacttgaaacagtttgactcttaccaaagtcaaaacgtcatataacctgaaacggagggagtatatgattaattgagtacaaattattataaacttagaaaataagttcaattgagttttggaaagaaacttctacatacatagttttgtaaagaaaattgtttagcagtttagtaagcatgataatggataacaagaaagttaccactaccatttgctcaaatgaacagtccctaagtggaaaaaaaaactatggtttcatggcctatatatcgttattttctgattaagatgtagattctatctcgatttttttagtatgttttcaaaccgtcaaacactgtgtatcgtgtaaaaattttttatatagaaactactctacaatatcaaataaactaattttttattataataatgaaaacccgcgttgcctccattgtagcataatataaccacatgggcccggcaacgtattttctcaaccaattctctccctggaccactgtcaggtgtgggcccaatcccaaggctacgtagggccatatccgaattatttttatgtacatgccggccgtcacgcatgaagcacgcgcaatatatatgtcgatactcgatacaatatgtcattttcccccataattaagatgataagtatagtatgttcaaagaaaatggtccggaaaaaaaatctaaaacaaacggttaacacagaattaatgagcaaaaccagattaattaatgcgtgtgtgttatattgttatatattagtatcatgctcctgtattttacaaacttactcccttagttttaaaatgtttgacaccgttgactttttaagtacgtgtttgaccattcgtcttattcaaaaaatttaagcaattatttattcttttcatatcatttgatttattgttaaatatactttcatgtacacatatagttttatatatttcataattttttttaataagacgaatggtcaaacatgtgttaaaaagtcaacggtgtcaaatattttgaaacggagggagtaatttgttttgaaaccaaattaaaattcggtgtgtggtggatccaagaaagccaaaacatttttcctattttgcgaggagaaaatccaaaacttgacttgcatttatgatcgatgttcgttattagttgcaacataaaaaaaatctgcgtgtcttgcaagcatgcgcgttcccggccaattaatatacttgaagaaaaatactctagaaattaatgctggtgtatggagcggctctgacaagcacgtgtagcgatatatgttactcatacattataaggtgattttaatgctttctgaacttataaagagtagtaggagtaaaatctccgtacgcatgttagggtctatttagcaaaatttttcgccatgtcatatcgaatatcaaatatttgaacaaatgtatagtgtattaaatataggaaaaaaactaattatacatattgtgtgtaaattgtgagacaaatcttttaagcctaattgctccatgatctaacaatgtggtgctatagtaaacatttgctaatgacgaattaattatgcttaataaattcgtcttgcaatttacatgcggaatctgtaatttgttttgttattagtctatgtttaatacttcaaatgtgtgcccgtatattcgatgtcacacgtcaaaacttttcacccctggatctaagcacaacattagtgatctaaaatcagataaaacatatcttattattgtgaaaatcagataggaggtttgttcaggttttaaagattcgtaatacatgattaaaagttttatccataatttttctatggcttatcatattttcaatgcatgagaacgtctcaaaaacccatattttgatcatttgatccggatgtttagagctactgctagctctatcaccacttcaccaggagatatcatgtccgtacaccgggagacacgcatacgcatatgctccatccagtgcgagatccaagaaccaaccatctactggagcagtacgtagtacgattgtgcttaattaatctaagcaccccgagttagatgcaatacgtcgatacgaccgatgctaatctgcctcgctattagcaacaggagtactgctgatcagtacgatctcgatcccggtaatggaaagcgaccaagtcatgtaactagtactacaagtaatattttcatggctgcttgcatgtaatgtaaaggggaaagggcaatgcagggagcacgcaaactaagcaccatgatttgggtgggagcacgggcatgtggcctacttattgtgtggctcggcgacatgcttagattactcctccgtaaacaaatgaaaaagggggtgttttttttttttaagaatagctactttagtccctaaagtttctctgtaggatctgtttagtccctaaccttataaatggtccaaagaaatccttaaactttatcataaggcctagaatagtctttgggtccaccaaaatcatcatatgaatatgctatatcatcattcatgcaaaatctatgatgaattgtccaatctacccttacatatatcataaaaaaaatataagggtgaattagacataaccataggaaaaaaatacttctttttttcacccttctgaggtatattttttctcttacatataccatatatttttgtaacttttttccttttgtttttttatcttcctatgcaaagggtaaattggacaaatcatatagattttgtatgggaaggtgacatggcatgtccatatggcgattctggtgggaccaagaactatattagcccacatgacaaatttaaaggacttgtttggataatatgaaagattaaggactaaaatgacccaggagcgaaactttagggactatattagctattctccctttttttccaagcatagcatgcattgccttgctatcttttcttttcttttttttggtgaaaggtcatatttgactccttaaagcattagggtgtgtttgagaaggaggggattgaggagattgggaagatacgtaaaacaagatgagccattagcacatgattaattgagtattaattattttaaacttcaaaaatggattaatatgattttttaaaataacttttctatagaaatttttttacaaaaaacacaccgtttagtagttcgggaagtgtgcgcgcggaaaacaaaactatctttctctctttctcctgcgctcaaacgcagccttataatcatcaaccctacatagatccaaagcaaggagatatactgaaagatgggcatgttactagaaaagttaccgaaatggcaagctagtgatagaactctaggcaaacattgtacgactagcaattgcactttgttcagtcaagagaaatactccatacatcagtattagaggcaaaacataggactaatttgctatggaacatcctagtttttatcatgtgccatatgtacttaccaggtatgtgtaatgaagctatcagctggatggtcagtttgccatgatggttactagccagattagcttaaatcctccaacaaacaagctactatcaaagtcaaaacaggcctataaaggattatataatttgcgccagaacatacctaaataaaagtacagcattcaagtacaaaatgtatgttgatcctgaaaaatatgagcagctctcaaaaatcaaaagcagtaacactaataaacctcccagtcatttagctcaaatttttagacatctccgtgtaatactttgaaagaagatgtgctcagtagcgtactatgatgcatgaatgcggccaagactggccacgggccaacccataggtactaattgacccactctagtccaaataaacgaactacatttcattttttgtgattctaaaagtgaaatttagttcatttagttgaactagtgtgggtaaaagagtatccacgggtcagcccacactcatccctagccaactagtgaagtgtatgtctaagttcctaatctttgtttacatcggcgtcaggcccaattcatgagtaagagaggatgaaacatctgtcggattggcttcaacctcagtatacagtcagcctaagaggtagcatggttagaagtcaaccttcaaaattatacaagcatctatgtgcaccaccactaatttcagagctgataattttggtcacttggacatgcacaatcacacaggtggaggtggaggtggaggtggagttgatccttcgttatctgtaaattgggccaaaggaaggtgattaaattggtaaaactaaaaagaaataatgttactgccggtgttctgataaacagcagcgaaggaaacaaaacatagaagcaaacatagttgctagagaacagatatgtttcaaatgtttacaacagctggctaaaatatagtgggtacctttctttcccggtaaacaccttgagatgtaagttttcaattcagttcggggaaccggtatgaactttccagcaaaagccaggggccaactgcatgaacaaggcaatagttagctcacagtaagcaagctacagtcaatcgttataatttatccatcccaaactaaagctgttttcttcgattgctatcagatcaatagttggaggaagaaaaggtcactaaataattttggaaaagtattaatcatccctgcaacagaagcaccacgttctacaaagtggacaagtatctcacctcacaaaaccaataccaacagaaacaagccaaagcttccaactgagtctcacagttgatgtaaatttcccaagaaactcaatgattattacctgagtatcagagatatgttagttaaattttatctgctccccgaactatttaatcagcatttgaaggtggattgagtatttccaccctttcatacctgcagcacgacagttatgctcactacagccaaaaaaagatggtttcttgaaaccccatcaaatatattcagttcatatggtttacgagaattgaactcgttaaacacctattgtaaaagaaatggagaagttaggatttttctcaagctgcaaaatggtgcacatctatgctatatatgaaaagaaaagataaccatttaacaaaaatcagtaacatgctttcaaaaggtgcaagaagcccaccgaagacaaattacctgacaaagcacaaatgtattaaatataaatgtatttttcactttattggcatgatcaagagtatcttgagtcaaatgcagaagatcccggcctctaaagttgagtgtcagaagaacagtaacttgaaagacagcctgtggttagaaaaaaaaattctcagcaactagccaagtaaaaaataattggattaacaatgcagaagcattatatgacaagtccgtcctacctgaatgaacaagtttctccacataatgttagtcacaagtggttctctgtgttaaatgtgaaagcatgttagaattttgttattcctttacaaatttaagacaatcaagaattatagtgagcacgggttggtttcaggtgtactaacttccgtccaacaggtggccgcttcataagttggtctgttggtggttcagtagccaatgcaagtgcaccaagtgtgtccataatgagattgacccaaagaagctaaatcaacaacaaacggaagtaaaacattcagccatgtgccgacgtgcaaatcaatacagttaagtatcttaatttcattttcactaacaatttccccttagcccatggtaaaattattttttcaaccccatctttatttacaggacatcttctaaatgtcccttcaacaaacttgattgatttaagatttaacatatcagaatacactagaaaacgtattcatgtcctaactggttttgcatcctaggtatgctttcaacaagacaccgccaaattccagattccaagtgaagccctcatgtgattaaagaatggtacagtgagcaagcaggatacagtccccaatagtagcaaaaaatgataatatactgaagtaaactccgtacagtgccacattgccactaaagtaacaagcacatactccatagttatttccattagccaatgtaatgattcagacacagcagcaagtggacaaactagttttattttgagggaatgcacataaaacttgtgcatcattgcattaagattgaaagaaacaaagttctcaaagaatccatcttcgcaactcccaaagcaaacagaccaacccaaaacaaaaaagagtttaaagcaacagagtttatctcgcaatatctttttgcggccttactacagagagcagtggccgaactagtcatggcaattcaggcatggctaacaatttgagttttaaactatcaataaacaaagttatactaatatggcatagtacatagcagtaactctaagagtattttcctctcaaagaaaattctaagagcattgtgttgttgcaaacctgaacggcgtttagaggaacatttcctgaagaaatagcagcaaccacattgattataagagccgcaacatttacagtaagctggaattgaataaacttttggatatttgcataaaccgaacgaccccagcggaccacctagaacgttacatatggataaatgttaaggcatttgttaaattaattgtgtaagattattaagctccaacttccctaacctttacaactgaagcaaaattgtcatccagaataattatatctgagctttctttagctacttctgttccttggatacccatagcaagaccaatgtctgcctaaattaggaggaataagagatcaaaattagaaatgtgcatcaacatgcatgatcgattgtcttcatctgattgaaataaaaccattatgtttatccttttatttgttcaaaacaaaattcccaattatgtatgtacctcatgcaatgcaggagcatcattcgttccatctccagtaacagcaacaacattgcctttctttttcagtgcttttactaggagaagtttgtcacttggagaagatcttcccatgacctacaatgcattgttgacatcaggttgcttcccctagaatgatcgagctaacagccagtacaagtactgaacatggtaatgtgtaaactcgaaagtatgtactccagatatatctgtcttactacatgaaataaatcgttaggcattctgcagcaatttctgcaaccgagctataggtttatggttccattttttgccaaaccaaaaaagcaagggaaaataacatacacaatgagcaatgaaccagcttaagaactaaaagcaccattataaggttacatcgataaacttggtacacactttaatatttttgcaagcacaaatgagattgttcttacactaatctgatcagcaactgcctccctttcagcgtcactgtatgcccggaaaacttttccctctattataactggttgagatgcctgggagtccgtgagtattccacactcaagtgctattgctctggccgtttgtaggttatctccagttaccattcgtacctgcttgttcaaaaaccgcaggagtttgtcaggtaatagtgatgagaagagctacaactattcaagtggcactgtgccaacattactagtgctcatagttttatgcctacacatccaacatgaacaaataaacagatttagttccttaagtaaaagaacatgaattctaaaggcaagaaaatcaagaaagtcacatatcttatgttcactggagcgtaattgtacatctaaatctgattttctataattgtatataacagtcaatatttgaaggaacattcaagtatcaacactcgctgtaaggaaaatgggactgtaatgtttgtaaaaatgcccattatgtcctccagtacacatgaattcaacaaactacatacctttacaccagcatttttgcacagatctacagcatttcttaccccagggcgacaggggtcctgcaaaaaatatggatgtcccaaacaaagacaaacaatgttaccagaacagtaataaaggaaaagtgagctataatatataactagccaaacacaaatgcaatcgcatggctagatactaatgcatgcttgtatttgaaaatagagttgtatttactagatcactcatgcatattgcaaagaatacatttttttatgaccataaggccctaataaccatccgataaatttatactgtaatctagacccaccatattaaattttgtataaccttttctttttcctctgattaacaagttaatttcttgcctttacaccagtgttttttaaaaaaggtttacaaggctgcatacaaggaacatttgtcccaaccttgtacatcttaaactgcatgagtggtcaattataccatataagtgaccgattatgccacataagcactacaaggtggggtgaccacacgaaaccgcttactgcttttcaacacattgttttagacatgtagaaacttcttttaacattgctttaaatataacagatatcataattcagatatcatggtttgctttgcatgtaccttcatccctacgattccaatgagagccagttcattatctggtaattcccagttgattctttcttcctcatttggaacataattcagatcaagatttctataagcaaaagcaacacatcgaagactttcctcggccatctcctctatgtatttcttgaactgattagcctgaaagacccagctgagacatgagaattattaaataaacctgagaagggtttcctatgtggttaataccttatcaggtgtcatttcatgactaatgccatttacatcaagccaatttgtacataaggcaagaacaatttcagcagcccctttccagtgcacatgaatatctgaatcatcctgaatgcaaacaatattataaggttgcagcgtgttacatgccaaatagaaggcacttgcaaatcatgaaaatatttgtactctagctaaactagatccataaaccaagcatagtgtttttcagattactgagtaatcagagcatgctcaacctgccatgcagtatttctatgtaaagaatggttttctcatttcagtgcaagaccttttgttcaaacaaatcaacaagaatgtctgttaacaaataggagaacttctgatacataagatcctttttgttacattctaaaatcacgaaaaaaaatgttctgaaccgatattatatcatattatcatagacattagacaagtaaaagaagatgtttggaaaaaaactaaactgcaatagtggagatgcaatgaatatacataacattaaattgaaaaagaaatgaaccttttgccaatcaaccaacaaaaataaagcatgtaatcatcaaattctagggagccatatttgagataaggcccattgccatttcatcgctatcgaagtacatgtacatattgacgacacaggaagaagctcgtgtatctaatgagtatgtgtctatgaaatcatttcaagaaataggatgccacgaacaaactaacagccaaaaactagatctcaaataacattagtgacaaaagatggatttaccacaatcactgcaacaccggcacgtttcttttctgagttgaatggggagacatgaataatagaagattttgatttctcctccgcaaatttcatatgaagctacaggaggcatcagccagataagtaaaaatgtagccaccaaaagagaagcaaagtatgagaatgcaaggaaacttacctcaacaccccaagaaagaatagccttttcagttggtgagcctgttatctcaataggactaccatcctgatgaatcaagaatcaggataacatagaaggataaaggtaccaatatgagacaatgcatgtaaagaatgcagatcactgaaaccactagcaatggcaccagtacacaagtacgaaaaaagacatatgtctcacattagagatcaaatttaaaacgcttcccctgcatgccttttaaaatggtatcaacttggtaataaactgactagtgctcatgtgcttcctcatttgcacaaatcttgaagcaggcaagcagcatccttagtagtggaactgtgtgttgttgcaaacagacactcaatatgatttaaagttcacactatacactattgtggagagcatagaagaacctcttcaagagaatgcaactcataaaaaaatcagaccaggatgttaaatacctaccaaatagataactagaatctaccaaatctaccagctactgaatagcctaatttagaataatgaacaatgttcaggtatgtaaactgcagtagtaataaacacgtggcatcacctctggctcaaaaacgctgcctgaagaattctgtgcgattccttcaagtataagagaggaaacaacaggcgacaaattctcaatatcagctggagatttcagctttatccccccaacaacagatcggacaacggtcatcttaagcaaccaaaattcagagtcaaataatcacaaaggtaccatggtaatttacaactgagtattagagtaaattgtatatccattactatgcaaaaacaactaacctgattgagtgttagtgtaccagtcttgtcactacaaatggttgtagctgaacccattgtttcacaagctgaaagcctccgcacctgaaaatcacatgagtggaaccatgtaataaccaaaagggtacaacataaacaaaaccgagaaatatataccagagctttgtctgccatcattttttgcatcgaataggccagcctgataaaataaaacaagaggttgaatgattcaaataaagttaaacatgaatgaaaacatcaacctatatcaactcacgttagagttacggcaagtggtagtccctcaggtacagcaacgacaacaatagtcacctacatggtactttgtaatataagaatgggataacagaagggtcttcagatacactgaacactaaaccactacataccgcgatagttagtatctttattgtcccaaaaattgtagatttcacacttgtttgccccttaacaaattgaatagagccatctggatttgtagtatgccctgtaaaatatctgggagcaaaggagaagttctaagtacatagtggatacatgggcaacaaacatcatatattacatatatacacaatcatgatggcgattcctaattatagtatcttatatatttctcaatatagggatcatatacatcattgtgcgtgtgtgcatgtattgtggtggggatcatacatcatggtgggggttggtcggggatggggggaggatgcaaagagactaaaccttgttacaagtgcagtagtgtctcttttcatctgtttcatgtatagtccagtttatatttaagttattcagatgataatcattgcagagtgagcactttattgctttaccaagcagtgtaatgatatgccatattgcactccaggttccagtacaattcaaaacgcataagtttagtggtaaaaagtgtcatgccgacaatttgatttttgcttgtatgggttaatcaccaaagctatactaaatttacatcaagaagatgcatagatagccattcactttgcttaccttgcaacaaggactatgagaaccattgcagcaacagaaagccccacaatacctatgaaagttgccactccattcaaccgtaccttcaacagaaaagagaagaacatgaatgaatcataagatgtaaatgatggcatgggcaactgttcaaatgcagggcaagtttggttctctaccctatcatgttttggttatttggtagtgccaaatcttgggcaagttttgaccctaccaaattttcgataggatagaggtgcctcaactatatggatttgacaaatattggcttcaatgcgaacacataataggtacatattgaagttgccaaattgttggtagtgcaaaaccaaaccagcccacaattcccattcaggtcatagcacagggattggagaaaaacctgtagtggagtttcttcattgttgtcttctgagatgctggccatcaataagccccactcagtgtttagaccgactgcagttacctacaaaagaaactgcaaaatttcatatacaaaagacttccacaccacattacaaatgttagaaaaaaaacgtcacaaacttaattcttgagggtataaggcactaacatacatgagacaaagtaatgacgttgatatttttgcacttcagtcgtgtaagtaggggtgaaatttcatatcatttcactagggtctgttaaaaagtccaccgaattggtttactctagcttgtgaattaatttactggactaaacagcagtacttaaatcgatgatcagaggtgacagatgggcctcaaattgcctctttttgttaacaggcatgcaattttcataagaaaaaaagtggaagagtgaggccattgaatcaagatatggttacttaccaacatggtaccataaccatcagctactttgcatcctcccattaagaaaggtgatttatggtccttgacaacctaataaaagaaacagggtttacatatgatggggaagtcagtcctatataggacaataggggtcgaaaaggttgcttacgatcttgctttccccagtcatactggattcatcaatggcaagagaatgaccactaaccaaaacaccatcagccgggacctaaaaggtgtatttagtttcattataatctcagaaatacaaacagcatagaacataaatcaaatcagaatgcatggatttacataatcttacctggtcaccaatttttagagccactacatcaccaactacaatatcaaatattgacacttcaatccttctaccacctctaataacctgacaagtgtaacacaaatacaaccccattagaggactaaaatattgttgctaattatctgagaaatgggtatattcatatggcgcacctccacttgtatattttgcttctcttcattaaggtgctggaactgaagggactgtttgtagtcactcacagctaatacaaaacaaaatgagtgtttagtaaagcaactaaattattccaactagagtgtcttgcatgggtttgctaagcagaaggaaaaaaatgttgaacattgaaaaatgaaggatatgggggaaaaacaaaacatgctgcagaaacattagtaaatgacaaacaacgtggaaactaaaaactgagcatgctttgagaacaatttgattagatctgttgagaaaattgcatacagtgtgttcttaatgaaatatcggacagcaaaagaatgttgtgaagcaagctattgtggctagagctgagactcttcaagcataggcgttggaatagcgtgcaggcttcagttaacagaatcaggataggcgagttgggaacatcagagggtcgtctgatactgatatatggaagcggctcaaccaaacaagcaataggtaataatgtcgtgtagcagattcgcgaacaagggttactgagcctgttgccctgttgtcagagaaagcacctgcactctctagctgacatatggaagtggctcaaccaaacaagcaataggtaatgatttgtgaagaagggttactgggcctgttgtcagggaaagcatctacactctctagctgccttttcgttgtattgtgcataatgtaactaagggtgcctgagatatttagacttggattgtttgaatcttcataacaagttctgtacaagccttatgtgtaataatttatttggggacgtctatcataactccattattgcagtaattgagtattatttgttactgttcaaaaaaagtacatgacaaaaatagaagtggtgttctatttaaaagagctaatgataaactgcaatcactttgccaaagaataacacaaaaaacatctagtcttttatcattacaaattaaagcatgactcaaacttcagaaaaagttaaagaacctttaacaatggtttgcatctaagtaaagtataatgatggtgtattcacctattaatatctcaactattgaactgcttagagaagatcaattagcatagagatgaacaggcgaagaatagcataccagtaacaagtatgacaagaaagaccgcaaatgcaatgcttgcaccgtcgtaccatccttctttgatgccctaatgaatttttttaagacagaacttagaactaaagaaaacactgatcaaaagttttgctggcagtgagggtgctcaactaaaccatcgtttgtggacattaatgaaattggatttcaagatcagaagggaaaataatatttaaccaatagttagataacatacagtgcataagaaatataagaaaggaggatggttataggagtcacctctgttgcaatgcccaataccagagaaattacagccgctatgataaggataactagtgtcaagtcttggcaagcttcccagaggaaaacctgttaacccccggaccccaaagaaagaaagacagacagacagacagacagacagacagacagacagacagatagagagatagatagatagatagatagatagagagagagagagagagagagagagatatcagtactgaaactaagacacgcttactagttgaaatggacaaataaatttaccaaaaaacttctcccctttttgcgagggtatctgttagccccaaaagcatttgccctgcatgccaaatctacctcatctccatggactcccttctccgtgtttgttttcagtaaatttgcgagtcctttaacctaatgtttattaaagaagaattccatgccttaattagtagttctaaaaatgatattcaagttaaatttgcagtatgaatggtacatgcccctccatatccgtgcagagaagaataatcatgatcccttgtcatagctgtaagctgctcctctccaattccgaacccgcgagggagaatttctgcattatatgaatgtgtaaggttttctctctttttctctttgcacagctatatatcacaatgcaattcagtcctttactatgtgaactattaatcctcgacaaagatagcaagcatattgataaacaacaaaggtaaacacaactaacaattattcaagagaaaaaaacacaactaacaattatgtctccagcctgaaagtgagtccacaaaagctacctggtaattccctatcaacatcatgcttttgtccagcttccttgaaaagtaatgcggcctgattgaattcaaaactgaaaccgtcaaacaagataccatgacatgatatgcatatcacaaatataaggttaaacatatacccggatgacttgagcatgagccctaattttcctccttatttgttccttttcctcctctttcttcagatcaagagtatatctgaatcgccgagaggcattgagcacaagagcagcttgctgccaatggaaaacatagttgtattgtgtaaaaataatgagcaggatacaacattagtcaagattgtatatgcattgctagttaaaataattttcacgagattgtttaacttgtaaattcagttctaacgattttacaagttcaataggatccacctaaaaaaatgatcaataggtcttcaaaacattaaaactaggacatttgttttcccatctgtgtacgaggttcattacaatgtctctgtacatgagggataggttcattacaatgtctcagcccgcaacagttgcatatgtagccaagggtcatgaatgagcctatacatgcatacctattcactaacatagtttaacatttcacagtacctgaagagaactaagaaccgaccattcatattcacagtcagtgttcatctcattagattctaggtggtagcaacagagcaaaatactaacaccagcaacattcggttcttacttcgtagtattgtttcctagagtaaaattggcaatcctcagatcattcggaagctttagagaaccacagttccacgattgagttttacaggagccacaaaataggaaaaaggtatacaggatcataataatagttcaatacttcctccgtttcataatgtaagtcattctatcattgcccacatgaatatagatgctaatgaatctagacattatatatgtctagatttattaatacctatatgaatgtggacaatattagaatgacttatgttacgaaacggagggagtataactaaaaacttaaaagcgcaagtggcagccaaaggtaaatcccgcacggaattaaacagcattgcacatggaagcatgagcagtagaatgtagcagttagcggagagaaggggaggaactcatactcaccctccaccggcgaagccgctcgacggaggcgcgcttggcggggatgtcgaaggggtcggccccctcgtccagcacgtcgacgccgagcacgtcgctgcagtcgttgccgttgccatcgtcgtcgtcccgccgccgatggtacctccccggcgacgcctcgggcgcctgcactcccaccggcatgattcctcaggagagatgacacggacaccaccaggcggcggccgcccccgatctgcacgcacattcccacaccaccctcatcagcaacagcataaacacacgcacaaaaaaaaaaaacaagcacaaatcccaacccatcccccgacccctcgccccccaaaaccaacagcgacacgcgcaaaaatccagagcaacctggggggcggcgagctgtagccggagccggaggcggcggcggcggcggcggcggcggagtcggagtggggggagggggtgggggaggaggaggcgtgcggcggaggaaacgaagcgaatcgagggctcagggctctgctctgctctgctctttaatttccgcgttgcttccctcccccgcttttcccgcttgaagagggggagtgcttcacgcagacgacgcggaggcgggggcgcttcggcttccgcttttttttgctttaactcggagaggaatcgcgccgcagttcgccgggggattttccggcgggtctcggagccgggagagtgtagtcgtggtggtggtgggctagtggtgaactcgtcgtcgacgtcgcggccgagtcgagttcgagaccgtgacttgtgtgatgaatggtgtcgcggtcggacgacgcgggggtgacctgacctgacctaacgagcccaactgctcgatcgaaccggcgcgattggctcggtgtctccgtcacgcgtacgtgctgggtgcgtggcacgcgcgacggtcttggctgggctgggctaaataaattgcgcgttggcgactttgtatctggggcgcacggcgtcgtgcgggcacgcgttggttcggttgcgaaccaacggtggaacggagcgacgaccctgtcggctgtagctggtttttgttttcaagtccgattgttttcctgatcctctcgatcggccagagccaggccaactagccaaaagacaagctaccaaaaatgtgctgtggctgggactgtgggtgttttccgtttctttttttttttactttgtctttttgtctctatcatatttacattctagttctataagaataggggggcggaaatttcttgaaaacctgtcaactaaagcgttgtgtcgggtttttcttttttttttttactaaatctcaatgctaaattgttgactagttagtttggtttgtaggcgaaggatattgaaacccggaaaataccgtacttaattgtaattccaccttagcctcactaattcatgtccagacctatacattaagttcacaaggcacgtcacatcccacaccagccacaagccatcaattttagaagcatcatcgtcgtctagttagtcactgtaatctcctgagttgtgactctcgttagtaaggctcctaccattcgaccattgcatcaatcggtaatccacattcgatctgtttattacaaaagccaaaaaaaccgatccgaaacattcatttttttcttctaacaaatttggttggcatatgttcaaacctaaagatctgccaaaccaaatgaatcaaatgtctccttcccctacttcccccactttatcctcttcatctccgagcattccccacttcacatcattagctgttgttttttatgtttatggtggccccaaagagattgagtacgataatatttcaagtaagggagagaggatgcaacagtaggggagattagtgatattgggtatgtatatggatgaagcgatgccaaagtataaaaataaatggatatggcgcaacaagttaagaggtgcgttaagaaaatattgcagaagaaaccatcacatataagaatttttttttctcaaaaaaaggggtgggttgtagggaatttaaaggattctgtatgtggaggaggctggtggctatacaaactctatccctccccgaaaaaaatactactctattagaaagagcttagaactctaaaaaaaaaagaaacatgggcatggtaagatttggtcattcaaattcataagataataatatagctatatttaataatttcaagtaaaattatatatatatagattatatattatatggatgctagccgcacaattacgcataagaaaaggaattcatgtaagcgtcgaaggcacgtacgattcctctccgcgaaaggagctcacgcgatcgggcgcatgtgcaaatggacgagagaaacgcatatacgtacgtacctcgggtaggtgatcgatccgccgtgcgcgcgccccgagacgacgacggcgagcggcgtacagagtgaaaaccagctcacaaccccaaacaatcaagcacgattcgatcgccggtcggctgagagcttcctagctcgctcgctcgatccgccggtcctctcgccgcgcgccgctgctaagctagcttctccgatccttgctactctcgatcgatcgatctcttgccgctcaactaggccaccagctaccgttttttcacgccgccctctttaatttggctacatatatgagatgatctctacggctacacgctctgctagctccatccgtccaaattaaaggggcttactggagagagtggagacacaaaacgcttgcttccggcggtgaacaaggaagcgatcgagcgcctctctgctttataagtatgtcggtagctagcttttgcgcatttgcatcgctgcctgcctgctctcaccttgtgctatcgctctgctcttttagagcaagtttaacaatatagccaactgctagctccaaatcagctatatccaaatcatctatagccaatgtaatagctaattcatacaatagttacttactatactattaatacctggtcctacctgacatacgcacattatgtcttggagtccgtgctgcagctgactacagatctatagcccactgttcttctttctcttcctttttctccttaaaatatgtttatagctggcttatagtctgctattgtacctgctcttatagagagagaagaaaagaacggtgttaactgttaagtatacggttttttgcgctacatatccgttatggtttttaatttgtgcagtgcaagttttctaagtctagagctcgagtagggctcaactagttaataacggcgtgattatattcacttcacgtattgatatatatgaattgaatgaatactattaccttcttacacaaatatacgacgttgattagtttaattttgagctaaccaacataaaaaaaatatggagggagtactacacactggggtgtaaatacacgagagggagagagggagagagggggagttgtagacgggatcttaattagtagtaatagaatgtactaaagagtcacgtacgaccaacgaaagaatctctcctaacagcagcaacatcagatactgacatatactgactagctaggatcttggaggagatggatatctatatcctcgtcccgacctgtatatatcgatgatttggcaggcagggtgtcgtagagctcgatcgatctgctgttcgcatgcttttgcaactggatatatgctaattaatcccactgttcatatgcagtagcttaattgactaggtcgttagtactcatgctaattaatccgacttttcatatgcagtactactactaattacttactccgtcccataatataagggattttaagtttttgcttataacgtttgaccattcgtcttattcaaattttttaaattattatttattttatttgtgactaactttattatctacagtattttaagcacaatttttcgttttttatatttgcaaaaaaaaattgttggaaacttggaacacaattggatgtcatgcatgtgtgtacgccgtgtcgccgtcctttgctactttttactcgttgatctagttgctcgatcgagcataattgcaactagatccatcacaatgtcgtcgctaaatcattcattcacacggattaattaagatatcgatgcatgcacgggcacgatattaatgttcgaaattaagtttgatatgtatacagatcagtaaaagagtagaatgacgcagctaagctagagcggttacgttcatcatcggttgggcggcagattattgcaaccatgcatataagcttgcctaagcagatcgatcacaaattaaagatatactatcacttttgtctgatgtcgtagacgaaccttgcgacaaatgtaacgacctagcttttctgccgtcgtgacgatcaatccacccctttgagcactcaaagcatatttgagagtatatctatgtacacattttgtcttatgcaatactacatgtctacatatacaaaatttgtcttatgaagcacaggatcactgcaatatatagtactccctccgtttcgaaatgtttaacactattgactttttagcacatgtttgaccgttcgttttattcaaaaacttttgtgaaatatataaaattatatgcctacatgaaaatatacttaacaatgaatcaaatgataggaaaagaattaatagttacctaattttttttaataagacgaacgggaacatatgcttaaaaaaatgaacggcatcgacatttcgaacggagggagtatattaattcgctattttcgccagaaatttccgcgctgcttcattcgctatgtatgcctatgtttttgcaaaggtattgatcgatgacttgaccaaagtagaacatgcatgagtggcccagggatagataggtcgtcagggcagaggatcgcatttgtgcggctagctaaccgacctgacctggcgtccatgatctcggtctccgagacgacccggagcaatttcaggcaagtttccttcgaatggaacatgaactactcactctttggtgagtacggctgtatctagctccttcaaactttaaaaaattccatcacatcaaatatttatttggacacatgtatggagcattaaatatagacgaaaaaaataattacatagattgtatgtaaattgcgaggcgaatcttttgagcctaattacgccataatttaacaatgtggtgctacagtaaacatttggtaatgacgaattaattaggcttaataaattcgtctcgcactttacatgcggaatctataatttgttttgttattaatctatgtttagttcttcaaatgtgtgtccgtatacgttaaaaaaaatttggaggaggaactaaacacggcctacattttccaagctgaaacatatgtctcagcgtaaaaattttctatatagaagtttaaaaatattaagtgaatttattttttaagtttataataattaagtttggaaagcactcgtgcgtgcgctcaccttaagtaaagaaatagcacttcctgttatgcagaaatgaatgtagcctaagacattcatgttgcaacacactcttagtcttagtcttaggccttattcaattaatcccctttagaaagggattagaggggatttattccacatggtgtgaaatcattctctctcaatcccttccaatcctcttcaaccccatccaaatcgaacaaggccttaggagtgatttaaaagagagagagcaccacgtgaactaagactataccccctaatattgtagtgcaaaatgacttaagtgtggctttaattttacaagtccgtccctaatattttaaattttcgttcacatattctttcaattgacatataaactcaaattttaccctaaacgccaataaggaaactaaaactattataaaatcaccccttcccccaatctataccatattgttcatccctctccctctctcctctctcacggcaccttcttcttgtgaggaccagacacgactacacgaggacgcacaacaagatagtggtacgggggttgcagtgcaccacaactagtcacccatgccctctgcaaggcacaagtgccatcacgggggacaatctcggccttgctggcgtacgcgaactgatgtggaagtccgaggttgctttgcaccttggtgcattgtgtatggcctaaggtaatttatcttgtacatgtaaagttatagctattatcaagttcataaaaaatatgttatatatgtacagacacgttggtaaaaaaaacaatggtgagaggtgctctaataaggcatatatgaagctagcgaagtgtggggtggagataataatgacatatatgggattatgtttgttttgttatctgtctatattgtatattgatctctgtcagggttatgaataccacatacttaatagtagtcgactaaatctcggcaggacccacttacataccatgtcttatacggaaacaaacttcgaatacaggaggagttccgcataaggaagaatgattagagttctacgtggaaacgacaaggactacttggattatatccatattggtttctctagttctatttagacaaggagacatctatgggtataaatacaaggccccctaggaggagaggggacatggaacaatagaccaagacacaagatcaacaacaagccaacatacgccaagacacgccgccggatatcaacttcaaagataagcatggctagtcccctactatgtctatagatactgtcaggagagacatagcgctgtctttgatctcgctggacacggatttgaggaggaaggctaccctgttgtcgactacgtgatgatacttcaagccaccatgtcgacaaatgttagataggctaccccaaatattgtattggtgtgattatggtgaataagagtaacgactggcttcggtcaacaggagtagggttattacctgacaattcaggagcccgaacatgtataaaaattcccatctccatctcttttacctcaatctcgcatataccatggtatcaacgatccccatactatgtaaataccggaatcgtgacatcaaacgtcgacaatctccctcatagtatttattatttaggagaaagaatgtatcgaacttttacaactcttaaaacaattgattttgtaatagagtaatgaaatctgtaactttacgatagtactttttagcaactataataatagtactttttgagcaaaatatactgatagcattttattaaaactaagcacttgaattattaatgattggaattcttcaagtttaaccaaatatcatattaaatattaaatatttataactgagcgcttaaactatttgtttcaatgctcaatttttacatttattgtaacaagctagaacgaaagcgcccgaaggcgatagctcaaaaaaaaaaaagagtatttccaggttcaagcagccatcctcctgcacgcagtgccagtgcacatgctctcatttcgtgcgtgtgctatccaaagttccaaactattatcaacatttttctttaaaaaatggtctacatattcatgttcaaaccatcatcaactaacgtgaacacacgtactcttatttagttatttgtgcatggcatccaaactgtcatttttctaaaaaaaagttatattattttttcacttttataaatatgcaagatgtttattttgttttggttctcttatgtttctccgtataaactgaattaagtattttattttgtgaagtgatatagataagatcgatcttaacctgtactacattgttaaaacactttacaatttttttggatatctaggtgacaaaggatatacactgccggaacggtcgagattctcggtaccatcacgcgttttgtggccgaaagcggccgactttgataagcctttaggggaagatcgaacgaacgtagaacatggccgtgtttagttgttttggtaaaaaaaaattttatatatacacattacaaatgtattaaatatagattaataataaaataaattacatatttcgcctgtaaactgcgagacgaatctattaagtctaattaatccgtcattagcaattgtttactgtagcatcacattgtcaaatcatagtgtaattaggctcaaaaaattcatctcgcaatttacatgcaaactgtgcaattggttttttatccacatttaatactctatgcatgtgtccaaatatttgatgtgacgaaaaagttaaaagtttgaagggaactaaacacaacccatgtgtgaggagtgagtttcgggtgagagggaccagtacatacaacctcttttccaaaataatatatatttccgttaacttttcgtataatgttttatcatttattttatttaaaaatttaatatagatatgtaaaaacataagttaaaattataatttattttatttgtgataaaacaagtcacaacaaaataaatgatatttacaatttttttagtaagacgaatgattaaacattatgcgagacgtcgtacattttgaaatgggcggagtagtatatacctttgatggtagattaagcctgcttgtttgtgcaatttttgggaagcggattataagccgaaggcaattttaaagtcttcaagacttcagcttcttggctgaggatatcatccgcatgtttaaagagaccaatcagtagcttgattaaggctatcgtaaacttaaaaagtaaatttatttaattttaaaaagttttacatagaaaatatttttaaaaaataaaagcgtgctaaaaaaactaggagctagataggcagctggtaagtagaatcaaacagtgccttagcagtcatacaatcagttggtttcccttgagtgtaggttaattaagggtgtatttatgaaggtgtgagtacgttattacgtgcatgtgtagtgttgtatgtacgtgtctaccatgtcatcggaaaaaagctaactcataaaaagagatgattaaaagccataaattaatcttaaaattaagtcatagttaaaattcaaaattatcgtcacttgtaaacttaagctcaaacaaaaatacccttgattacattcttgtaaaaaaaagaagaagaaaagctaagttacctgcgacatgacgtacggatgaacgttatatttaacaaatcttggggtgtgtttggaagcgagggttacgaagcagcagggttacgaagcagtttagtgcatgattaattaagtattaactaaaataaattaaaaaaatgaattaataagatttttagagtaacttttatataattttttttaaaaaatacaccgtttagtagtttgaaaagagtgcgtgtggaaaacaagagatgtggggtgagaaagtaaagataagaactcagcttttcagttccctacgggataagtttctcatgcactacttgacccccaacagctccactagcgcaagtgcttgcacttgtcatcgcaacaaaaaaaaaatcaacaaaacagctacggtacaaattatgttgcacttgtaaaagcgatcaattaataaaaactaatctcctaataagtacagatacacatataaaaatcgctttattataattaaagatagtatcttgtcttcttctctttgatatgtaagggcaaatggacaatcacaaatgaaaaaaacataacgcgaatattaggaagtaacctaatattaaataaatagaagaggctagacttcgaactcagccaactaagcccatcgtcaccttgttgagcagtcaggaatccctggcatttctcgggcaatcacaaatgagctctcgatcgatctccttttctatctgtctgcttctgcaagcaactcgatcgatctatatatctagccagattattcctagcttgagtgtttcgcaactgcatatgctaggtccccggccgatagatcgatagaaagcctcctgcatgcaggccagttggtcgcatgcgtaatagctttaggacctgttccttcctgttctataattcttagcgttttagataaaattaaggctaaactattataaattatctagcttaaaaggcaaaatataaatatatagatttatctcacaaagtatactatgataaaattaaaattgtatttatttattgtatatattttgtaataaaaagctatagttatagatatattttagagatggtgtcattattcaaaacgttaaaaattacgaacggaggtagtaggagtacttgggtacttttgacaactatagctacttaaaaatcgctagctcctttaaaagatataaattttgtttcgatttggacacttagtaactacttcatatgtcccaaaatataagtaattttagagggatgtgaggcatcataatactacaaggccgagtttagtttcaaactttcaacttttccatcacatcaaaactttcctacacacacaaactttcaacttttccgtcacatcgttccaatttcaaccaaactttcaattttggcatcgttccaatttcaaccaaactttcaattttggcataaactaaacacaccccaaatttaaataacatatatatttctccaaaatcctttatattataggacagttggagtacataagagaaaaataaattagtagccatcgactcagcttatagattctgattaactggatacttaagtacttaactgcttctcagaacatacatttaggtctcaaataggtttaagtcgggtaatccacctggctcagaaatgcagctcatctgcctcgatcaagcgatcaagcgaactactagctagcctagcagtagctgcaggttagattgggagttaggttgcgttaactaatataatcgcgcattaattcgatttgatcatccatgatgcattacatccgaccacacctgacgtacgacattactgatcaccaactacaacagttgccatctagtgaaaagtaacaatggtagatcaagattatgtcatataatacacatgtttaatatataattatcctatcatgacagtgtttacttagacgagtttgcaagtgctatttacacctgctcccggtgtttgcacacacattgtcattattagcagatcggcgtcaggtcctgcaggctgcattatcctgctagcactttagacccccccccccccccccggttttgagatataagcatttttagattatttagcagagattaaaatcagaaagaaaatattttgatacatctcattaaataagagatggttatggtacaagcatttctaacatgtttagcagatgttaaaatcacaagaaaaatattttcatacaattaaacaacatatggttatgagtaagatggagaaaaaataaacagaagttggttgatgagatgagtagtagtaataagaatatgtagcacaagaaatgcttatatttgagtataaattttaaacgatagaactgcttatatttcgaaacagaggggttaaatcttatccagatgcacactattccagtttgggctatgctggggaagatgaaagctgcgtttgcatcattcacgcggagctcgctttattcctctttggcaaaggtaaggtaataacgcgccagggcaagctggccatctttttttagattaaaacaaaaggcaaaagagatgaaatgaagaatcatcgaaggtaaagagatggaccatcaatgatgagaggggttacacaattgtactccattcgtccaaataaaaaacccaacctagtaattatttagattcatcgtaatagattatatcccatccttaattaggttggggttttttttggactgagggagtacatatttgcaatgtttttgaaaatcaaaagcccatttaaccaaaggaaagatcaggcttagctgtgtcgacggcccagcagccagcactagattgagcccagtgagagatgcagaaaatatttcgaggtcgaactcaacttagtggacaatgactaaaagtaatttgacttcttttttaatctaggaaatatacagataagactgttcacttacaggttattcagatagcgatgggagcaacaggccaggcattcttgatgccttctgaatctgcagtgagtttctaccaaaaataccaggttgtgacttgtaaattaccaatggaaaggagagagattagtttgagcagactgcatatttcaaaatcttgaaaaaaaaatcaagctttcaagctctcgatttcctgtctctccactttataacaacttgaatttgcacgtcagaattaagagcagctcttgatgagagctaaatgatcttctggtgatttagcctcttaggtagtagtgtaaaacaacgaaaatcatcattctgtacatttctttcccacagtgtcaaattggactttttgtaatacagtaaaccatccagtacaggattacatatctatattgaacctgaaattctccatcttttctataaaaacacgatggtgactttgactcctccaggaaaaccacagcatatgcttttgattttggaatggagcagacagacattcagataaatttattgaagagtactaccaactgtgactgtttggtgagtcttcctgcagcaaaacttgatgtttcagtgtaagtagcaaacagtattacttatgcacttatttcttttacacatataaaaaaaaagatctaagggaagtccataatacttgcgcgaaaatgacggaatgcaatccctgagaaattcagatgtcctgtatccgatgaattatttcaggatcccattgtccgctgctgtaactggatggaacaacagatatctcttgccttccttgccactcttcaccaggccttaatgtaattggcttctcagcatttgcagcccctacacatagcatgcatttgtactcttcctccccaaaatccagtatcgtttttgctttcctgtcccatgggttccaaacaactgcataaaaaaaagtatactgacgagacatatatatacagaaggccccttgtgggtggcttctttgttgacccggcaaatacacacacacacacacacacacacataaaagtaagcaaaacaaaaggaccagaacaaccgtgctgtgtaatccagaaattagcatcttaccaacatcaggaagtccctctttccttaactcaaaagttctcttcttgtcatggtcaatgatcacaatcttgggtggagcactcaaatataccttctccgccttagcaatcaaagcattaacaagaaacacaatcttactgcaatggctgcaaaatatgaaacttgcaaatgaattatgaagcttacttcagattcgaatacaacggcatctccttgttcagtacaacgttttccacattgcaggttgtcaatgtagtccaaggtctccaaaccctcaacccgtacttcactggaatgtgaaaacaatttttatggaggaaaaatacaatgtagaagccaagtacccatatagtacatcattcattctgtacatttgaataatatttggagtgataaaatccaaaagaggtccgaacataacttttgtcaacaaaaatcagcacgacttagtatagaagtgcatatcctatgagctatatgcctcagtcaaagaatgtaagaaatgcctaattttacatataaacataatacaagcaaattaccacgacaaaatgtacctgatgtcagagactgaaaaatatgtgttatatgaaaatccaaatttgaatggcttcccatctgcattggtattttttattcgagatgtgagcatcagatctcctgtagggctaagagcaactcgcagcctaaactcaaaactgaaatatatggataatcaacttcatcaatttagcaggagccaaaggatatatcaattcaaaaatggaacattctaatctaccaatgccatagcaaataatgttaaggatttactagaggacacctatgcggccagatcttcaaatcttctggggactgcttgagtatcaagtcaatatgacagtttgaagtggtagctggaaaaggagggggagtttcatcaacactccataatcggttccttgcaaatccatgttgttcaagaactccatggttcccaaactgcatgatggatcgtccattttgggtattacaggggagacaaaattcttgaaaaacataactggactatgaatgaacagtcccagggtcatacttgaggaaagcaaatttgtatgcccccacgaatagcctttggtggtttgaaataagcctgccaagaaatttaaaaaatgtggaattattgggtaattgtaaatggcttaagtgtcaattcatgtaattggaagataaaacgtttgacactcataacatatctcattttcctgaaaaactaaaaacgaccaaaaaaaagaatggtaaaacaaccacttatctaagaaaaggaagccttgctgccaaatctgtagagtgcataaatgtaaaaatgcattcgatatataggcctgcaaggcagaaataatgcccttactgaacattaaaagatctgaatacctttctactaacaaagagcagttgttctcgatattcattttcccaaaagatcacttggcctccgtacagaaatacctgaaaatagtgaaaaataacgtacttgaccatttctgaggaaaaaaaaagataataaggaacctgtaaggttatctaatataactgaaacaacaacaacaacaacaacaaaaaggtcataaaaaaacaaagcatgagcaatgtgcaaacatgtccaagtgatttttgtttgaacgaaaggcaacttgccttattcattagagcaatatttacaacaaacatgtccaaatgattgggtctaaaacagatgagacataccgttgccgagaatacttaaaataatggcaaaaggccaatcaaaaccacagctaacaatagcatcatggtgtccacccccaataaacaatttatccacatcttaaagaatgaaatcaaatgatactaaattaagcgtagatatgaacatccacctccacagacaagccaaaggtcaaacaccaattgggcatttgaccaaacctgctaccttccctcgcatgatcgcaacaaactaaactacagtaatactcaaacattttctccaccaccagaatcaactccattaattcccaccaattccccctaactaattacatctcaattacaataattttgtggaggattggcgacgaacagatcgatccagtgctagaaatactgcaactgaaagctagggttgaggagagggggtcgacctggacggagcagccatgggcctcgcgcaggacgagcttctccagcccagtggcgccgtccttcacgacctccacggacgacaccccgccggccatcgatcctagccgccgccgccgccgccggggaggaaacggaaaccggcggtgaactccggtgggggaaaaattggagggaattgaggagaaacgatgggatttgtcgctcaaatttataggcgctggcgaaacaaagagggaaaaaaaattgttccagagtttgaattgtttcacgtcaatttcatatataataaaattttcaaaaaaaaaaaatctgttgaagtactgattcaaggtttgccgcagctaacccatacgtacataaagaaaattataatatttttttgaaagcagcaaagtgcttgcacgtatgtagattgattccagggtattatttaggttattttttggctggaaaattaagaagaagaagaatatttctatgtgctgctgttgatcagaacaggtcatgcgttttcattatgttggtctaattttctgaccagctgtgagccattgtagacttttgtatttatttttttgcagcaaaggaaaacagaaacttcaaacctaaaagaatagccaacttgaaaaggctttactatcctacctgagttacaccctgcagcagagacaaccgattcaattcaccaacaagagcatgtttttttttaaaaaaaaagaaaaaaaaactgtgttaagaaaaaagaagatgcgaaaacgaacgttactactactttcaacggaaattgcgagaggcctgttgggctgtcttgaaaatgggccaagctgttggttttgggcctttcagttggctctgtcacataatggaaataaagcccaatagtctcaggttgtgttggagaattgaggggtttcgtctgttgacctaattgtgttggagaattgaggggtttcgactgttgacctaattattaatcaaagataaagtcaaaatttaaaattttaaacttaaatttgaagttaattttaagacaattttgacgcagtttttttatattggcttttaagtcgctaagaacacatatacaaaagttttacctatatattattttttattccctaataaacaacttatattagataatatgggcaaccgatgaggctgtgagagaagggggaaaagaagattgataagatacgtaaaaccaagtgagctattagtacataattagttgactatttattattttaaacttaaaaatatattaatataatttttaaagcaactttcctatagagaattttttgcaaccaacgtactgtcaaatagttcagaaggcgtgcgtgttgagaatgagatatcttttctcccaacccattgggagaaaaacacaacctcaatttactttagttcagaaggcatgcgtgttgagaatgagatatcttttctcccaacccattgggagaaaaacacaacctcaatttacttatagcattcaaaaacaaaatgctccatcatttgcttgttggtttatctgacgcaatcaaaatttgaattttaaaacttagtttcagagtttactttaaggtttttcatcgtaatttattttctagcattagcttttaaacttataggaacaaaaatataacagttttaattaactatgaattatttttatttatccattcatttttttcatggtttattagccataaagcaaataaggagagtcagaaaaaaattgctcatggagcaggctattccatgcaggttctgaagaagaactcttctgtctatcacctagctagaatgcagatgcatgcatccatttgctacagtattgacttctttttcatgtatagcagtagtaactgaaaccttcgatccaaacaagcaaacgaccatgcatgtgtaaaacaccctgacaccatatatatatatgtcacatcagcattgggccatatccatggtaccatgcctacacatgctacaatatatgtgtaactgttttcttttttcgatcagcaaaaagatgattgcctttgaaaagggctacagccactgttcatctagcaatatatttatatctacaagttgtggatcgatcgtcaatttcgactcgagtaaactctgaattaatctctgaacagttctgacgatgaacatatgcagcctatatacatagctaagcgattggctctatatacatagctggagtagtatagcttcccagctgctgcaattgattaaattgatttaattcgatctgccactgcaaatctgcaaaagggctatcaccactgtccgatcgaattcgtagtaatagattgtgtctaattgatcagtaattaagttgctatatttctaaacggaggaaattaatatttatatatctacaagtcaatcgatcgatatcaatcgccaatttggactcgagtaagctctgaattaatctctgaacagttctgacgatgaacatttgtatgcagcctagctcatataggccttgttagttccaaaaaaaaaaatttgcccaaacacgtcatatcaaatctttggacatatgcgtggagcattaaatattgataaaaaaattaattgcacagtttacatggaaatcgcgagacgaatcttttgaatctaattagttcataattagccataagtacatatgctaataacggattaattaggcttaataaattcgtctcgcggttttcaggcaagttataaaattagttttttcattcgtgtccgaaaactcctttcgacatccggtcaaacgtttgatcgatgtgacaccgaaaaattttcttttcgcgaactaaatacacccatagctctcccagctgctgcgatgatccagatgaattgattaaaattgattcaattctgcgcaactgcaaatctgcaaactgatgaatgcatatgatcaatatggaccggaataatgcgtgtgtggcagtagcagtgaagactgaagagagcagctttaaacaagatttgagctgcggctagctagcagatgaatcgtggtgtagatcgatcgacgacgatagctagctgaggagaactgcaagagaattgatttggcctctctatccagaagcaataccgttggtcaattaataattcagactcgagatatcaacgtacggcttttcacttttgccgcattacatttctgatgatttctccagtctcgattcgatcgatcgatgtcgggattcgtgcaaatttttgtacgggtgctgccttatttacttatgattgggcagagtaaaaccacattgtaataagttatttcctgctggcagactgccacagtgactgggatcaaccggacatatgtcgtgtggtgttaatctgtgccatgcgcataggaatatataactttttagaaaaaaacatttgctaaatttatggaaaatgtccgattttatgtgccattttatgcaaaactaggctttgaaataattacatggaaaaaatattatattttgtgtgtataaaataatattaatcatgtgccaacaccagctcttttgcctatgtgattgtgcaattaattccaggacatcagcagatattgaatactgggagttatatatgccatgtagcagtaagcttatagtaataactacttgtcttgcccatttgtgttttggcttataaaccataatcaattaattttaaattttagaacttgacttgtgagggtatttagaacttgattttagaattaattcggtatttttttttggtaggggggggggggagatatttaggggaatggattctaatccctcgaggggatatcccctcgtatacctttttcttccaaattcgatgcaaatagtagtgaaaaattctgaaaaaaattgataatgtggagtataatgatacctactactccaccaaaattcaagttcaaattcgacctacacatcgagaaacaaaaaaagataaatttagatataaacagtacgctactattcatacgctgaatttctcttttttatatctcgatgtgtgagttgagtttgaacttaagattttgtgtagttgtatatatgaatgttgtcaaatttttccagaattttttataaccgtttaaatggtttttaaggaaacgagggaatatcccctcgagggattagaataatttcccgatatttgggggtggtttttggatgactgaactaccaccacacaagcaccatatagggttttaactatcttgatttggaaccggcgagaggtactcaatactcaattttggagttgagaagtatatttggacacatacaatagtttgagttggtcgaatctcgaatagaatgatgcttatagacaatatgtatttaatttcttacccttttggtgagggttaccttctacccggttg
